United States Patent Application Publication US 2007/0015696 A1 - sequence listing, part 2

SEQ ID NO: 1939 - DNA, 3118 bp, Homo sapiens
gaagggagggcgaggccggagcccgagggcgacccgagaagcggcggggcggcgggccggcgggcggggcgcagagccaggcagcgcaggtaggccagaccgggccgggcgggggccttagggtggggccgcggggcctggccccggggcgggcgggccctgcctctcttgcgtgtccggttcgggtcctattagttggagaggtcagcgtccagcgcatctcggcttgagctcggcgtgaagtaggccgtcttggggaagacaggcctttcctgggagcagtcctatgtctgggataggctttggggagcgtgaggagtcgggtggcagcggggcgcagggcggggacgggctttggtgttagctgatagcgggcatgtgggtaggaaagctttgggtgagttggggattaggtggggtccgtttaggaatcaagggtcgctataggagttaaaagctggggttaaaacttaagagttagtgtgagtcaggtccgttttagataggtaaggtttagattacggtcattatcttgtttgctgggatggccatcatacgtcataatttgagttcagggtcaggttaagggtcaacaaacaacaggaatcaggttagagcttgtttgagggattaaagaatgttggcatggtcggtgttaaggataaacagtgaaagcgtgagttaggaatcaaattataaatgaactttaggcttaggggtcaacatttagggttaacatcaggggatttggtgctaaaggcaaaacttagatcagtttcagggatcagggattggatatgagtctgtgctaggaaagggatgaatgtccaagccggtactgggaatcaggaaacaaattagaggtggggttaatgttaggaatttggggcagctttaggggttgtggtttgaggctagcatagttgaccttgagcagataaaatttaagaggttggcagtaggtaaatgcccttcttttgtagggaaatcctttattcctatgtagttacaggggcttctttttacccagagagataaactaatttcaggctagcgttctggctttagctagaattgcaggcatctgggattccagcttctttattccattctctaagcccaaggcccttgctgtggccaccacagttaggggacagagattctggactgtgttgtttacagacaacataggtgggaaatagggacccaggatgtacaaggcctagtcacaagttggggactgcctagggaagaaggagctgatgactatgggggaagctaaccaaggaatcactgttgccatgggagaagggaataactgaatcccctgaaagtttagccctgcttctcccacttcacttgttctcttggtattaagccctcctctccaactctcatccctgactctgcatttcacacccatcctgcctatccccttacaaaatacttcccttgcctttaactctcccatgctcatcttatcatccgttcccatccttagttctacctccctcaccaacctttaatccgcacatcctacctgaatttaccctcatcaaaacctgagctttcccatcattttaaattactctcctaccattttcacccagtcatgtacctacattccacctggtcatctgctgaataccctactcccatcccctgctgtgtgtcaccccctggatctaagcctcttttaatttcttggaccatttgtagatccccttcccccactccccaacagaaaagaggaaacgagacccaaagaggaaactgggtcttgctgatcccacgcccagccaggccactgaccacacccccacttcactcccagcctgaccctgccactgaccacagcactatcctctactcagcctgacccagccactggctgtaccccatcccccatcccagctccagctttacttagacattgccaatgtcccttcactttcccacccccaccccagtctgatttagtgactgaccacaggcccagctcttctcaacctcctatagcctgacctggcctctgacctcaccccatcattccctgacttagccaccatccatgtaatcattccccttcccccaacctgatgcagtgactggtcatatatgtatcttatgtatatgtatttttccaaacaccatcatcaccagcattctttttctacaccctgtcttctcatcctttttctacaccctgtcttccccattcccagcctgatgcagtcactaacccaaccccatctgcccctagtggctactaatcatatactcataccctttttccccacagcctaaccacatcccgtaaccacagcctcatcctcacattctctgcccaacctgatcctttcccctcttcccaattcgtcgcctaaactcaagctgccccagccgctaaagtggctgctgatgataggaagctgtgggactctaacctgtctaccttagtagttattaggtcctgtcatttctacctccccaaacttgttctgagtgacatcttcctcaatgccattccaactccggcttcattacctttaatttgtactaatacagtgtccttctaactaatctccaaggtaactgccagagttatttttctaaaatccagttccggttatgtctcttctctgctcaaagactcccttggcttccttttgtcctccaataagtaaaattcctcatacccctctccagtcttcctctgcctttccatcctaaccctgacttccccaccactgctcccttgcaggtacccctgtgcttcaacagcctgcctgctcacttccctgaatgctcctccacgatttactgcttctccatctttgcttatgctatttctctgcctggagtgaaaactacccctgacacatctccagctggctggcgtagtggagaaagcttgggctttgcagtcagaaacctgggttcggatcctggcttcacaacttattatttggagaagtatttgaacaagtatttaacatctttgagtctgttttctgatctgtaaaaatggaaataatgacacctactgtaaggattaaatgaaattatgtatacaatgcaagtgacatagtcaataaatggcagatcactattgttt

SEQ ID NO: 1940 - DNA, 10231 bp, Homo sapiens
ttttttttttttttttttttttttttttggagacagggtctccctctgtcacccaggctggagtgcagtgcagtgatgcaatctcggctcactggagcctcagcctcccaggttccagtgattctcccatcccagcctccagagtagctgggattacaggaacgcgccaccacacccagctaatttttgtatttttagagacagggtttcaccatgttggccaggctggtctcaaactcctggtctcaagcaatctgcctgcctcggcctccccaaatgttgggattacaggtgtgagccactgtgcccagtccatcatctattgtctgtaataatttagaaatctggcaccaggattatgaaattcactatacagtgtgtggcataacaccaagcttaaatggtcactcagtggacttcacaataatggccactttatgcttctggatgcaaaacgttgggagagtttgaagtggatatgaatttgagaatgcgttttcttgtaggaaaagtaatggaaacataagcatctttttctaatcacaggaaaggttaaggctttggtgaaagcaagcataactgagtttaaaaacagtctagaataagaaaagggtaatagaagaggaaggaaggcagaagtggaccatgcagaataaacaatcaagcctagcttttttaaaaacctgaggtcttactaaagagaaaggaggaaaaacggaagatttcaacataagagtgttaaaggtggaaaagagccagaaaggactgtgggcttaaaaaaaaaaaatcagtgaagcagtagtggtgtatgttggcaaagagaagtgtagagttgagaggagggagagaatttatagtagaggaagtcggtgtgaagttttcctctcaagatgcccagcagagcaaagaaggaatgaaggcaaaggccactgggaatagagtagggctggggctaaaacagcacgggagagtgcaacagggcccaaagtaagacattttcttttcttttcttttttttttcattaattgacccagatttgcttgtttgggaccaaaggcaatgcagagtttagggatctttataatttataaagtaatcacctttggcccaacataacacagatcataaggatcatggcagaattcgtctctgagacaagtacaaaataccattttagagttgattttagaagagaagtcagactaataaattgctgtgttgtagaaatactatggtgaattaaacagctttaactttttctatcagccacaggataaatacagaaactgtataattacatacacatccacagaagatagtagcctcatatgctaaaattgtgagttgtttgtctgtatactgtagtccaaagctcccattccaagaaatgttttatttggttcaaaatataaagggcaggttagagggctacacagaaaaaaggctaaaaataaagacagtaaaatgagggagaggaaaagtggaagtgcagcactactgatccagaaaaactgaggcatcagccacaaagaattcaatcaagtcagtgaggggcaaatggcacaaaagccaaacaagaaaaaggctgaataccatattaccaatctgagagcctcacttttggttttaagtcaaatattgaattagattgtgcaacttttctatttttatttttttatttttaaaaatccaccaaaattacttaaatcatttgacagagtcatacaattttaaatgactataaaaatgtgcagatcagtgccaaattttttggcaaaggctgaatggcagacagtaatccaagacgcagacaaccttgcttttaagccatccgttacacagagaccagcaggctcccttctacctgtgagaccaaataatcccaaaatgtaaccaaataatcataactccccctactcctaaaacctacccttcacccttcactgtctacgtcagcctctggacagacctgatgcctggggtttggccatttccgccttcccaccctgtgttggtctccctcctccctcctcaggtccctcagttctcccaggcctaacttggcgtgcttccttcctctctcaccccaatcaatccggctctccttccctttctgggttacgccacctgcccgactcccggtttccccctcgggggcccctccttgccctggggtctgctctcggcccgccaagttctcccaggggatccctccccacctgcctccatacagtcagactgtgttcagtgtccgtttcgcgcccgtagcgacaccacgacagaagcccactaagtgaccctctgctcccagaaaccctcctggctcctccagaccctccggggctctggcccgcagctcccctctccctccggcggcgggggtcggctgtgactcaccagagggccagcggccggggttggggtgggggggccggaatgctctcacttcctctccgcgcacctgccccgaggctggagcgccgcccggccgggcctccggcggatgttttccttgttcccaagcgtgtagtgcgcgccagccgccccctccgggacctgcgcgccagccaccgcgcccccaggacccagcgggcctggtcctcaccactcaccccctccccagcaggcacgcatgcgggctcgacccacacctctgcaccgccccccaacttctgggagaggactcctggctcagcccagcctctagctttccagaagcccctatatgcctacctcatcttcgttataggcgatgaaccttcacttctgtccccgtttccgcacacgcaccaatccccactggcgatcccttccccttcggcatcacccccaccttcatgcgccccagctccccactcacatccgccccctattgggctggctctagcttgcaagagcagaaggtggcccagggcccagccttccaggatgtcccctggaccccctctctgggaaaggcggcagagctactggccactgacaagacctttgggccctcgtgctagacaggccttcgaatccacctgctccagcccagagagcaggcccaggccgtgcctcccacaccgcagccgacctcagagcaccctgcctcaactgtgagttttttcttggcaatcctctgaaacggaaagggtatcagtcctgactagggcgaacgtgaggtccattctgcatctccatccaccttagctgtctccttggaaaaggacagcaagggagtttgaggtgcactgacacagtcatttctgaacagtgaagagatgacaggtagggtggtcccccttgaaaagtcagccagaagtagctgtatctgatgcactaggtggcagggagtgagtcttggagtaaatgggactgaaaacgtagaaaaaccaaataaatgccaaagagactatccctatggagaatacctagaacatgggtctttgaagtgtggaaaaatgaaagaaatccaatttgaccagggcctttagtgccaaagagatggctagcaggagagtggtgagaaaggagaactggagagttcacatgagcggaaataggaagaaatggatccaaatccaagtgagaaaaagcaggagacttaaagttagcctggcaggatgatgagaaaaggacatcttgtcctagggtagaggcgagggtgcagatctgggggaagaaggcttattgggaacagtttctcaaactagacattcagaagtcaatacaagggccaaaaccaaaatgttcctggaggtacctgtttttgaaagaggtgggaaaggtgacatggattaggggtctccatcccccaggccacaggccagtaccagtctgtggcctgttaggaagcgggagcacaaagcaggaggtgggcggcaggcgagtgagcattaccgcctgagctcctcctcctggcagatcagcagaggcattagattctcacaggagtgcaaaccccactgtgaactccgcatgcaagggatctagattgcacactccttatgagaatctaatgcctgatgatctgagatgaaacagtttcatcccaaaatcatctccccgctgctatccccctccatccactggtggaaaaattgttttccacaaaaccggtccctggtaccaaaaaggttggggactgctgacaaggagtatgagtgtgaaaggtgcagaggtctatgccaggagacagccatccccaatagaagccctcagctatgcacaaactgcttaatgtcattcaaagaaaataatgtcgcccattttgcctcagagctttagccccaatcacagcaactgctatttcctgacgcttacgcaccagagatggtgataagagcactgcacgcattatctcagtaatcctcataacagcccaatgagttggcattactatccccaatttatagatgaggaaacaggctcagagaggtgaagtaatctgaccaggttacatagctaagtggagtcaggatctgaatccaagaagactgtctctacagcccatgctctcaataatccatcctgggctcctccagaacctgtgggaaactcagaggatgccaaatgataaattcctaaaaacctcactccattatatatgggaggaaagagaggacacctctgtgaacctggagtgattcatcccatcagggcacttagagatgctcctctttgaaaggggaaagaaccatccccagatgtggggtgatcccacatctgctgtatgtttgaaggtgataagcaatggacagttcacctctggaatgcctgaggaaaagagaccctccccaccatctctgaggggcagccctatttcttggatacattagggaaaccctgccctaggatctgagggaaacacagtctccactccaggtgcctgctcactctcctggagcttctggccgtcgcaccctattgcagctcctgggtttggctggggcacaggattaaccatccccaggaaatgcctccctccggtccaggcagggatcccagcatacacacccctggtggtggcagtgggggagaaagggggaaggtggaatgcttccttctctccaggtcagggaagagatctggggaccacctgggggccctcgcccctcctgcctccttgctggggaagtgcccagtccagtgccccctccatggccacctccctccctctagctgtgccggggcatgaatcagctctcacagcttgttaaagctagacctcttgttttcatgccctcacctcaggaaacagagttacaacttttccagctctactcagcagggggccagggtcctcactttataaacatccccagcctgtgagagcagagggcagggagatagtgtgagacaggagcccaggggagaaagacagaaactaagactcaaggagcaacgcaaagcaaagtcaaggagtcaagaccagagtagctgagcagaggccaagaagggtctgagagggctgtgcagcagcaatggccctaaggatgctctgggctggacaggccaaggggatcctaggaggctgggggatcatctgcttggtgatgtctctactcctccagcacccaggagtctacagcaagtgctacttccaagctcaaggtaaagtggggtgaagcgttaggaatggaggagcagcagagagggcacagggaggatggggccttacagatgatcccgtgtcaaaatacccaggcttcctccagctgtgaaacaggaaagacaaactaaatacggggatagtgcgtacttactgtctccaccccagaccagaagagcctctgcctctcatcagcactcctacacctactaacatttcccgttcttccctagccccctgtcactatgaggggaaatattttaccctgggtgagtcttggctccgcaaggactgtttccattgcacctgtctgcatcctgttggcgtgggctgctgtgacacgtgagtgaccaaagatggccagagagaatgactctgatatgagtgactgagggatgaccagggagtgactagattgctgtgatgtaagaatgaacagaagagcaatacaagatgggccaaacctgaagggaccaacactagtgtgaaagataaggcttcaggctataaatcaggggaggttggggtggacctggagagaaaatactcctgttataaaacaaaaaggcccacatatggtaggtgacagcttagttaggaggaccaaggggccactgaaaggggctctgtggggggaaaactgtgagagagggaacatgtgggcagggataaaggcagcctttcactgtgctgactccttcccctatccttggttccccaggtcccagcatcccatcgacttcccggctgggtgtgaggtacgtcaggaggcaggaacctgccagttctccttggtgcaaaaatctgaccctcggctgccctgcaaagggggagggcctgacccagaatggggctcagccaacacccctgttcctggggctcctgctccccactccagctaaactcaactgatcatccatctgctgactgctcactgctgctgccacttccagggaaaccactagcagctgccaatgtattctgaacaaataaattaatgctatagctgaaagcccgactctcactgtccacgacattggaccccaggtggaaaaagtgggtcccattagagtccaggtgctgagttctcagtatccggaaggaactagcaccagggtgggccagtttcagatggttatggtgctggtgctggggcctggggcagcatatgaggccagggtggggctagtaggcagcaccttgatgggcaggtcccagctgaaggtgtctacaggtacttgctcaggtcctgtccaggtggtaggttcgggctgttccacagggggtaggagtaccaatcctggttctcgggacgttacaaattcaaaatgcaatctccacttcaaggacactatggaagaaaaagattaaggtagaagcatcagaagctagcaggagtaaaagccaatgacaggatatagttagtgaatgagaagaaaacaatctgtgttcaggaagacagggaaaagtcacagggcagggagctgtgattaagggtttttctgaagcaatgggtactaccacagatgtgagctgaagatagcagtattaagtacctaataacctaagagtgaggcagtcaagtctaggtagcatgaagtaatcaaaaatcagtgtatcacagggtcctagtaggtaggtgtggggaaggagttctatcaagctgttaggagtttaggggtcagtgcatctaagaaacaggaagaggttgaaggtctgagaaactgttccgggtcagaggctagacgtgggtatgtctgggagtgtgtataaggaatcaggatccattacaccctcccttagcacagcattttactgtccccctctcccttctccagtaacagtgagggtctcaccaatggctgtacagaagcctggggtggagctgagagggattgggagggagaagctggttctagttgtatgtaggcaggattcctggtgccgggcgtgagtcacatgtgacacagaggggacaccccctgccccacgtcgccgctggtactcaggctgtacacgctcctcggtctgtaagctgactgaaaactgggagcaagagacaggtgtgtgctaacaggaagtgctgtctgtaggtgagaggacagcccaacctcaagctgttttacaaagggaccctggatgaccccactatccccttctacatgccacccctctttatacaggccttccaccctagcccttcaaccccagcaccccagcaggtaagaagctctgctcccttcttacctgcaaacaagctacggttccttcccctaagtttaaggtccccaccacgtcctcgccaagtctgtacacagatttgaagatgccaaacgtcccaactttccctcggccatcactgatattgtatagatctggggagaataggacactataagcctggagtctacatactggataacgtctaggactgggcaccacaggccaaaagatggggcttttctttaaaattggaggtgtcaggtatcagtggatccacagaagtgtgtggtggttaggagactgtctctgagatgggaaaacaatgaggggaaggatggggtaggacaattctgaaagaattctcacggaggctgcggcaggatgtggcagccattaggcgttccccagccagctcagctagccatgaatctttcttcccaccttcatcctcctccaagaatggactggatggggctacagcctcatcctggggaaaccggacatcctgaaggcctagagaaagaatgagtggagaggtaatgctgagagggaacggagatgagagtagaggttagggttttagattctaacatgagatggctaaaggtaaggggtgccagggctgaggtttacatctctatctccagaaccctccctcccttcccaactccctagcactgtcactgagaccaggaagtttccctgcagtccctcttgcaagccctctaagacaatttctgctttggcatcgcccttccccagcccttccctccaggagcccttgcttaccagtcagcacaagaaccctcagagggactctgagtaaagtgataggggagttgacacgctggcagccaatggtcagtttgtagacgtacttgactgactgaccccgaaaggagggtggtccctctatgggcagcacttcactgtaggagtctggttgggaagtagttgtcaggacagccagaggcaccagaggagtcctccctccaggagacttagaaggcaattcagggatggggacaatcactcacatgatttggactctccaggatcaagcctcaggtcacagaatagaattttcggtggagtagaaaggatacactggcccctctcacctgaaaaaggtaaaaatgactaatttaatgacccattgtccagtactgaacaagactagcacggcaagtggagatagtgaaaggctgccaggccctccgtccctgctgtgaaatgggaatagtcttctacccctaaagcaatagtcatgctccccaacatccccagcatgacagggactataagaacaagaacaattaacaacttcacccatgggtgacaatgcctccacacacaccctccgcaccccccctctcccaggcaaatgcccctctctaacctcggtgtggcagaaagacagtctggctgtcgggctggacatctggctgactagagtcaggaggaggcagtgctactcgactctcactggcatggaactggcagtggatttgggcactggcccaggccagggcctcactgtgggaaaaggaaaaggaggcatcagaggtagttcctgacctcacaaatgctttcccaagctccctatcacaccatcttaaccaacaaggttagatggctgtcctagtgatcaggaaatccacaatcccaaagagaaaccattaaataaagagtagcagactgtgcgtaaaaaggggaacgggggaggggaaggaaagcgtacagctatgtcatccacatcttctgttaaagagccctctcctacaatgacagcacagtgagcaagaggaggtggtgtcgctacaggacaacctgagctctgcctcagccccagagataatctggcttcttcccagaagggccaccaccttcagtgccagcatccccacctggatgcagaagtggccgtgggcggaagggggttggtgacggtcactacacactccagcgcctccccagccaaaaatacaggaccccggctgagctctgctaccacttcaatcatggcagctccggaatcagatctagaaggaaacaaggcggggcggaggtcagcaccttgacagggaggggcgttgcggtgagcacctagggctgagggctgaggacaggggtggtcagcaccgtggtgcccgagggagctcctggatataggaggggtaggcgggtgggagggaggcgactgaagactcagtactgcccagggggaggacatcgctctgggccctagaccccagcccctgtgcgacgggttcttctccctgggcacccccgcggagttcccaaactggcctccgctccccctttcctcaaagttccacgtcccagcccaagatcaccgccgctagtcacctcgcatagtcgacactagggatcggcacccctaggcctcatct

SEQ ID NO: 1941 - DNA, 7328 bp, Homo sapiens
aaccattccacatttgtggggaagatctggctcactgttctgattgtcttccggatcgtccttacagctgtaggaggagaatccatctattacgatgagcaaagcaaatttgtgtgcaacacagaacagccgggctgtgagaatgtctgttatgatgcgtttgcacctctctcccatgtacgcttctgggtgttccagatcatcctggtggcaactccctctgtgatgtacctgggctatgctatccacaagattgccaaaatggagcacggtgaagcagacaagaaggcagctcggagcaagccctatgcaatgcgctggaaacaacaccgggctctggaagaaacggaggaggacaacgaagaggatcctatgatgtatccagagatggagttagaaagtgataaggaaaataaagagcagagccaacccaaacctaagcatgatggccgacgacggattcgggaagatgggctcatgaaaatctatgtgctgcagttgctggcaaggaccgtgtttgaggtgggttttctgatagggcagtattttctgtatggcttccaagtccacccgttttatgtgtgcagcagacttccttgtcctcataagatagactgctttatttctagacccactgaaaagaccatcttccttctgataatgtatggtgttacaggcctttgcctcttgcttaacatttgggagatgcttcatttagggtttgggaccattcgagactcactaaacagtaaaaggagggaacttgaggatccgggtgcttataattatcctttcacttggaatacaccatctgctccccctggctataacattgctgtcaaaccagatcaaatccagtacaccgaactgtccaatgctaagatcgcctacaagcaaaacaaggccaacacagcccaggaacagcagtatggcagccatgaggagaacctcccagctgacctggaggctctgcagcgggagatcaggatggctcaggaacgcttggatctggcagttcaggcctacagtcaccaaaacaaccctcatggtccccgggagaagaaggccaaagtggggtccaaagctgggtccaacaaaagcactgccagtagcaaatcaggggatgggaagacctccgtctggatttaatcctggcgggcttaaaacctgtgcttttcatagtttatggtaagcagcagctcactgaataatgacttccattgagtaaacatttggctctggttatcttcagggatgctgttggctcatgatccaagctcaggggactctggaggcggggctgggctgagggagagaaagggaaacacagtgttcccaggcacatgttcttagcaataatacagttgcagaactttacatttgtgtcttccagatctggagaagaacagacatatttaaatcattcttgttgaacagtttttgtatgtacagtattatggtacttttttttttttagtatgagaactttttttgtatttgtacattgaactgctgtagttatacttttatattaaaggggaaaaagtccttataaataatgcctattaggctagtgctattactttgttcagcaaattctaccctggctttagagtttttaatagatgctacacctaataaaagtgcctctcatattgcaggaacgatttcagatgtgtaaggagactgaagaggagataccagtttttagtcttggaaagcaagttcacagtagaaggaggttgagatctttcttttatgtgagaaatctttgaatctcattcatgcgatcagagttgtagccaatttttgaaaaccttattttcaaaggaaataaatgattcactgtaggattcctttaaatatcaagcatcaccagtatatgctttgatggtatatgtatataacttaaagttctttcaaaagcctgatacagaaacgtgtccccagtttggtagcaatgtggaaaacctggctagagatgatatggagctgtccctcagaaagcaaagccatgcctggaatccctaataggctgcttagttgtgaacctgtttgatttgccttaagcctctatccagaaacctgcccgcttccgtctggttaagaagccagtggtggatattttctttgttaacattagaaatgcaaacattcccttgtcaaccaagaatactcaaagctacttgtattggaaatggcagaaggcctaaatccaaatttcttattttttataatttaccatagaagttttgtgattaaattcttacttctgccagtggaggtttatgcctgaaaggtcatggggtcctgtctgtaaatagacctaaagagaagtgcagtatttattctttgtaggcataatgtgtttgtcactgacaagcattcatgttcatcccactagtcttttattgcagtcttttattgtcattttcagccttatgttggagagctttgctttctcatcatgttcacattgtcttaagttttgtgagcttctgagaaagagcttggtaaaggtttaaaggggactttgttccaccagggagcattttatttgggcgtctcacccttttctaatgaaagctgttgtaagccacctctgacttggaaattctgaaagtatgaatattttttatatcttaattgtaaaatgccagttctccattatttagatgaatagtagaacactgcaccctttgtgcagtgtttttgtttctctactgcattcctacccccaccaaaaaaaagaaacttaaggaaatttttttttgagacagggtctccctctttcacccaggctggagtgcagcagcatgatctcagctcactgcagcctctgcctcccaggctcaagcaatcattccacctcagcctcttgattagctgggactacaggcatgtgccaccatactcggctaattctgttttaaaaattttttttgtagagatgaggtctcactatgttacccaggctggtctcgaacttttgggttcaagtgatcctcccgcctcagcctctcaaagtgttagtattataggtgtgagccaccatgcccagcctagaaaatttaaccttatcttttagccattcatttacttttatttgcttttttaaaaaaaaatctttaaattttagcctagagaagcacctcaggaactctaaacatcttaggcaaaaattaaactcaggtgagactgaaggagaaatttcagaaatacacatgtacctcatgggtaattaatagacatgcacagtttccttcaaatcaaatgtttaataaggaaattcatataattccaagaaaacaggcaaaatttggaatacataagcctagctaagataaagaactaccagttaattcttaacatcactggagcttccagcaggttttttaattgaaggacaaaaagtgtccatacatttgtgttatctcttcagagcctgagggagaagagagtggctttgcccagtggaaaggctggggatttgagaatgatacagggggaaggagtcaagcagaaatgccaggaagaaccaggcaaagacatttggcgccagaagcatccacttaatttctgtgaagagtgcccctggtgtttcatcttggcctgttttgatgagaatgttatcttttgtgtctggataacgcgtcagcttcttaaagtacatataaagatattctgtcacctccccacatgcacacacttttaaaatctatttttattctcttgctaaagttgtaattatgtcaagaattttccagctctaactgccttcttagtacatgtctttctgcctttgaagcatatgagtttgccaaagtcattctcccctaatgacatattgtggacttacattaagaaaatgggccaggcgcggtggctcacacctgtaatcccagcactttaggaggcccaggcgggtggattacctgaggtcaggagttcaagaccagactggtcaacatggtgaaactccatctctactaaaaatacagaaattagccaggagtgctgggtggacgcctgcaatcccagctacttgggaggttgaggcaggagaattgcttgaacccaggaggcagaggttgcagtgagctgagatcataccattgcactccagcctgcaagacagagtgaaactcttgtctcaaaaaaaaaaaaagaaaaaaagaaagtgagcctgttgatgtctagctaacccattggtggagtctgcattgaatctgtaagaatattgttctggatcatgcaggtgggatttgtataaaaagcctgtccaacatttagttctcactcgcatcagaatcatactgttttgaattgccatataagacatgctccatcatgacacttgcttctcctccaaatacaagttgagtgcttagtccttcacctgctagaatcaggatacaatcaacatgattatgttccttaacacacttggatttatgcagatgtggtgtgtcctttgctcttttttttcttaagacagagtcttgctcttgtcgctcaggctggagtgcagtggtgtgatttcggctcactgcaacctccgcctcctgggttcaagcgattctcctgcctcagcctcccgagtagctgggattacaggcaccaccaccataccaggctgattttttttgtatttttaatatagacagggcttcatcatgttggccaggctggcaggctggtctcgaactcctcacctcgtgatccgcccacctcagcttcccaaagtgctgtgattacaggcgtgagccaccgcgcctggcctgctcttaaaacccgttattcagaagatttgtaaaagaaataggctttttttttttttttggttaattcaaacgaggggaaaattagatagcattttcccctaaagaaatgttaatgttcattttgtggctttgttttcaagtttcaggagccatgtacatctcagaagtgttacgaagtgattagaaaaggcctctggtaaaagaccttcaaggaccaaccattattattggtcacttgtttgaacttggcgcttaaaaaaaaagttggactgtgatgctttggtgctctttatcacagacatcagtgatggtctgaaacactctctagcagtttatacgaagaatggacttacatgttatcagttacactcatgatttactcgttcagcttctacaagtccatactttatgctgtctcatttaagagacagtccacttctgaaaataaaatcgatagttgatgatacatttttggctagccagctttctgtaaaaggcaagtatgttagacatgcacagtttccttcaaatcaaatgtttaataaggtacttcaagaaacgcctttttaaaaatcaaaggttttggccaggcatggtggctcacgcctgtaatcccagcactttgggaggccaaggtgggcgaatcacaaggtcaggagtttgagaccagcctggccaacatggtgaaaccccgtctctactaaaaataccaaaaattagccgggcgtggtggtgggtacctgtaatcccagctactcaggaggctgagatgagaatcacttgatcccaggaggtagaggttgcagtgagccgagattgcgccattgcacttcagcctgggcaacgagtgaaactctcaaaaaaaaattcatagtaataataaagtccctgcatgcagtttggaaataaaatttaaactcatttatgtgtaataaatatgtaataattcacagtcaccatcaaatgttggaatcattgaattgcatacttgtactcattccggccacatcatgaagtgtttaaagatttgtatttgctgttgtccctatgtagttctattgatgtttggttttgttttttggggtttgttttgagcccaggctagagtgcaatggcacaatctcaactcactacagcctggacctccttggctcaagcagtcctcccacttcagcctcccaagtagctggtctgcaagtgctcaccaccacacctggctaatttttgtattttttgtagagacagagctctcactatgttgcctagactggtctcaaactcctgggcccaagcaatcctcccatcacagcctccgaaggtgctgggattacaggcataagccactgtgcccagcctgtttttaataatgatattaagtgggtttggttcatgtgttattaatcagtgttaataatcgtacttttttttttttttaaaagaaaccatggtattctaaaatcaggagtccaaataaaagaaagttctcggctgtgcatggtggctaacacctgtaatcccagcactttgggaggctgaggtgggtggatcactagaggtcaggagtttgaaacaagcctggccaacatggtaaaaccccctctctactaaaaatacaaaaattagccgggcatggtggtgcacacctgtaatcccagctactcgggatgttgaggcatgagatttccttgaacctggaaggcagaggttgctgtgagccgagatcgcgccactgcactccagcctgggtgacagagtaagactgtcgccaaaaaagaggaaaaaagttatccagtgcagtttctacagagataaaagaagtaatagttctggctgggtgtggtggcttatgcctgtaatcccaacactttgggaggccaaggcaggtggatcacatgaggtcaggagttcgagaccagcctggccaacatggcaaaactgtctctactaaaaatataaaaattaggtatggtggcacgtgcctgtacttacagctacttgggaggctgaggcatgagatgacaatctcttgaacccaggaggcggaggttgcagtgagctgagattgcaccactgcactccagcttgggtgatggagtgagactcaaataaaaaaggtactagttctgcatttcagagttggcttgttgaaccaggctatatgcttccaagatttaaatgtttttctgtattatactctcaattgtgttttaaaaaaatctcttacagaaatctctacctcaggcactaagtgttatgacatgggtagcatattgatattgaaaacttagctaggacttccagccttttaagataatttaaatgtaaaattaaatggttaaccagcaatctaatgtcatgtggtgtgcagtttggatattgcatgaacagctaaggaatcacctgttctagtgccaaagatcactcattgctaattttgttctgtacagcttatgtaatattttcatggtggagacggactctgtgtgctcagggccttgtctctaggaagattttgtcaattccaaatacagttttgaagattca

SEQ ID NO: 1942 - DNA, 1387 bp, Homo sapiens
  misc_feature (903)..(903): n equals a,t,g, or c
  misc_feature (1320)..(1322): n equals a,t,g, or c
gtttttagtcttggaaagcaagttcacagtagaaggaggttgagatctttcttttatgtgagaaatctttgaatctcattcatgcgatcagagttgtagccaatttttgaaaaccttattttcaaaggaaataaatgattcactgtaggattcctttaaatatcaagcatcaccagtatatgctttgatggtatatgtatataacttaaagttctttcaaaagcctgatacagaaacgtgtccccagtttggtagcaatgtggaaaacctggctagagatgatatggagctgtccctcagaaagcaaagccatgcctggaatccctaataggctgcttagttgtgaacctgtttgatttgccttaagcctctatccagaaacctgcccgcttccgtctggttaagaagccagtggtggatattttctttgttaacattagaaatgcaaacattcccttgtcaaccaagaatactcaaagctacttgtattggaaatggcagaaggcctaaatccaaatttcttattttttataatttaccatagaagttttgtgattaaattcttacttctgccagtggaggtttatgcctgaaaggtcatggggtcctgtctgtaaatagacctaaagagaagtgcagtatttattctttgtaggcataatgtgtttgtcactgacaagcattcatgttcatcccactagtcttttattgcagtcttttattgtcattttcagccttatgttggagagctttgctttctcatcatgttcacattgtcttaagttttgtgagcttctgagaaagagcttggtaaaggtttaaaggggactttgttccaccagggagcattttatttgggcgtctcacccttttctaatgaaagctgttgtaagccacctctgnacttggaaattctgaaagtatgaatattttttatatcttaattgtaaaatgccagttctccattatttagatgaatagtagaacactgcaccctttgtgcagtgtttttgtttctctactgcattcctacccccaccaaaaaaaagaaacttaaggaaatttttttttgagacagggtctccctctttcacccaggctggagtgcagcagcatgatctcagctcactgcagcctctgcctcccaggctcaagcaatcattccacctcagcctcttgattagctgggactacaggcatgtgccaccatactcggctaattctgttttaaaaattttttttgtagagatgaggtctcactatgttacccaggctggtctcgaacttttgggttcaagtgatcctcccgcctcagcctcnnnaagtgttagtattataggtgtgagccaccatgcccagcctagaaaatttaaccttatcttttagc

SEQ ID NO: 1943 - DNA, 856 bp, Homo sapiens
agatgcttcatttagggtttgggaccattcgagactcactaaacagtaaaaggagggaacttgaggatccgggtgcttataattatcctttcacttggaatacaccatctgctccccctggctataacattgctgtcaaaccagatcaaatccagtacaccgaactgtccaatgctaagatcgcctacaagcaaaacaaggccaacacagcccaggaacagcagtatggcagccatgaggagaacctcccagctgacctggaggctctgcagcgggagatcaggatggctcaggaacgcttggatctggcagttcaggcctacagtcaccaaaacaaccctcatggtccccgggagaagaaggccaaagtggggtccaaagctgggtccaacaaaagcactgccagtagcaaatcaggggatgggaagacctccgtctggatttaatcctggcgggcttaaaacctgtgcttttcatagtttatggtaagcagcagctcactgaataatgacttccattgagtaaacatttggctctggttatcttcagggatgctgttggctcatgatccaagctcaggggactctggaggcggggctgggctgagggagagaaagggaaacacagtgttcccaggcacatgttcttagcaataatacagttgcagaactttacatttgtgtcttccagatctggagaagaacagacatatttaaatcattcttgttgaacagtttttgtatgtacagtattatggtacttttttttttttagtatgagaactttttttgtatttgtacattgaactgctgtagttatacttttatattaaaggggaaaaagtccttataaataa

SEQ ID NO: 1944 - DNA, 971 bp, Homo sapiens
gaagcacctcaggaactctaaacatcttaggcaaaaattaaactcaggtgagactgaaggagaaatttcagaaatacacatgtacctcatgggtaattaatagacatgcacagtttccttcaaatcaaatgtttaataaggaaattcatataattccaagaaaacaggcaaaatttggaatacataagcctagctaagataaagaactaccagttaattcttaacatcactggagcttccagcaggttttttaattgaaggacaaaaagtgtccatacatttgtgttatctcttcagagcctgagggagaagagagtgctttgcccagtggaaaggctggggatttgagaatgatacagggggaaggagtcaagcagaaatgccaggaagaaccaggcaaagacatttggcgccagaagcatccacttaatttctgtgaagagtgcccctggtgtttcatcttggcctgttttgatgagaatgttatcttttgtgtctggataacgcgtcagcttcttaaagtacatataaagatattctgtcacctccccacatgcacacacttttaaaatctatttttattctcttgctaaagttgtaattatgtcaagaattttccagctctaactgccttcttagtacatgtctttctgcctttgaagcatatgagtttgccaaagtcattctcccctaatgacatattgtggacttacattaagaaaatgggccaggcgcggtggctcacacctgtaatcccagcactttaggaggcccaggcgggtggattacctgaggtcaggagttcaagaccagactggtcaacatggtgaaactccatctctactaaaaatacagaaattagccaggagtgctgggtggacgcctgcaatcccagctacttgggaggttgaggcaggagaattgcttgaacccaggaggcagaggttgcagtgagctgagatcataccatt

SEQ ID NO: 1945 - DNA, 5365 bp, Homo sapiens
gtccacgtgcggctgcgccagcgcatcatcttgtacgaattaaaggtgcgattagggagcggggtctgcaactgggtagggaccagacaggaccgggctgagataacgcacagggcctaactcggtgatggggcctccggagagatgctaagcagctccttctccaagaaaggcaggtcctggggaatgagaaggttgagaggaggccgagatagggctgcccgagctccaagcgtgtaggaaaaggatgcgccagggctgggatcggtggctaatgcttgtaaccccagcactttgggagaccgagacaggtggatcgcttcagtctaggagttcgagaccagcctgggcaacatagggaggctccctctctaccaaaaaaaaaaaaaaaaagtttgtttttttttaagtaagcacaagaagcgggcggggcctaaggcaatttggttcaaagttaagtgatgggagcggccagcagggcgtcttgatacagctgaactggaacttcaggccaggaataaagcgcagggccacctgggggcggagcctctgatgggcagggctgaccaggggcgggtcttgggatgctgggcggagcctcaggggcggggcctggggtgctgagattgaccgcggagggatgggggcttgggttgctggatccggccgcgaaggggcggggctgtaaagggccgctggtttcctggagcgggtggaaccaggactgcagaggttgttagcgggtggggagacggctgcatcagttcacgttaaggaggatctctggagagccagacctggggaaccgggaggcccgcgccttgggaaatggagtccaagcgggcatctctcctgccttcaggtggagctggaggagacagtggtgcggcgccaggctgcggtgcggacgctgggccagcaagccagggtttggttggtgcgggtgctgctcaacctgctggtggtcgcgctcctgggggcagccttctatggcgtctactgggctacggggtgcaccgtggagctgcaggtgcggacggtcttggaagaggaagccagggggtcctggaacctacatttccaacggtggagggaggggacggaagtttgggatgccagagatcttagagaggaagtatgggagagggtatgttcggaccctggacttagggattttaaaggaaaaagagaggctgggcgcggtggcttacacctgtaatcccagcactttgggaggctgaggcgggcggatcacgatgtcaggagttccagaccagcctgaccaacatggtgaaaaacagtctctactaaaaatacaaaaattagacgggcgtggtggtgggcgcctgtaatcccagctactcaggaggctgaggcaggagaatcacttgaacccgggaggcagaggttgcagcgagccgagatcgcaccgctgcattctaggctgggcaacagagcgagactctgtctcaaaaaaaaaaaaaaaaagaagaagaagaagaagaggccggggggaggaccttaagcttggctcctccaggaccccaagcctctactcatggtccatcccgctcccaggagatgccccttgtccaggagttgccactgctgaagcttggggtgaattaccttccgtccatcttcatcgctggggtcaattttgtgctgccgcccgtgttcaagctcattgctccactggagggctacactcggagtcgccagatcgtttttatcctgctcaggttccagcctcacggggatggctgggaatgatgaagggtgggggcggtcagagggatgttggcgctgacaggtaagacacggaaatcctgctgataccgaatccagggattcaaatcctgactctgttggccaggtgcagtggctcacacctgtaatcccagcactttgggaggccgaggctgaggtcaggagttcgagaccagcctgacaaacatgatgaaaccccgtctgtagtaaaaatacgaatattagcccggcggtagtggcttctgtagtcccagctactcgggaggctgaggcaggagaatggctcgagcctgggaggtggaggttgcagtgagctgagatcgcgccactgcactccagtccgggtgacagagtgagaccctgtctcaaaaaaaaaaaaaaaaaaagaaagaaagaaagaaagaaatcctgattctgtcactgggcctcagcttcatctgtgagatgggttgaatgcgggcgcgttccactgagaagggaactgccacatggtgggtaccgggtcagggcccattctctgccttccccccttcaggaccgtgtttcttcgcctcgcctccctggtggtcctgctcttctctctctggaatcagatcacttgtgggggcgactccgaggctgaggactgcaaaacctgtggctacaattacaaacaacttccggtgagaacggcatgggtgtgcgtgggactcttgggtccctgaaggaaagatggagctgggtgggtccagactcttggtttgggcggagaggggagcttggggtgctggaacactctcccaagggtatgaaagtttgaaaaacgaggacccccagagaaagtattgacagggtctcataggcttgcgatgtggagactcggacgcgtgggcctccaggtgcccgggtcccgagttctttctgatatatttcttccttcttcagtgctgggagactgtcctgggccaggaaatgtacaaacttctgctctttgatctgctgactgtcttggcagtcgcgctgctcatccagtttcctagaaagtgagagccccgccccttgctgtggccccgcccctctaggacgaggccgtgccccatcgcgctgttcttttcaccgcgcacctttttaccattcccgcctctgcctgctccctttgcttgccctaggtccgcagatctccccgctccccgcccttgttttagtgggttacttccctctggccccgacggcggcgacatctgggtcccttctagtcctcaggacccgccctctggacacaccccctccacgtggagtcctgaaagtcccgcccccccccccccaaccaatacgcatgcttcctattggcgggcggggcggtggaggcggggaaactccaggccgccactcccctgactccggcccggccccgccccgtccttcaggctcctctgtggcctctgtcctggggcgctgggtcgtctggcggggacccaggagttccaggtgcccgacgaggtgctggggctcatctacgcgcagacggtggtctgggtggggagttttttctgccctttactgcccctgcttaacacggtcaagttcctgctgcttttctacctgaagaaggtaaggggtaggggggacccttgggtctgaggcaggaggtattggggcccgcactcctgggtcaagggcaaggaagatcctgggggcctggattactcggtcctgagagaggagggggttggaggacagactactgcatctgagaggaggggtctagggcattctgacttatatgtctgaggatctggggactcagactccggggtcctagatgaggaaggggctcagactcctggttcggaaaaaaggagaggcaggtaggccgggtgcagtggctcacgcctgtaatcccagcacttcgggagactaaggcgggtggatcacctgaggtcaggagtttgagaccagcctggctaacatggcaaaaccccgtctctactaaaaatacaaaaaaaattagccgggcttagtggcaggcgcctgtaatcccagctactcaggaggctgaggcaggggaattgcttgaaccagggaggtgaaggtcgaagtgagccaagatcgtgccactgcactccagcctgggcgacagagcgagactccgtctcaaaaagagaaaacaaacaaacaacaacaacagcaaaacaaattagccgggagtggtggtgcacacctgtaatcccagctactcgggaggctgagacacgagaatagcttgaacccgggaggggaggctgcagtgagagccactgcactccagcctgggcgacagagcgagactctgtctcaaaaaaaaaagcctgggcgacagagcgagactctgtctcaaaaaaaaaaaaaaaaaaaatggaggcacagactcttgtgtttcagagcccttttctccgtgccttcccccaccagcttaccctcttctccacctgctccccggctgcccgcaccttccgggcctccgcggcgaatttctttttccccttggtccttctcctgggtctggccatctccagcgttcccctgctttacagcatcttcctgtaagtgcgagaggctcccgcctctctccctccctctctccccattcagtgttcagactcctggcactatgtgagcccagcctgtcttgacttcaggatcccgccttctaagctttgtggtccattccgggggcagtcgtccatctgggcccagatccctgagtctatttccagcctccctgagaccacccagaatttcctcttcttcctggggacccaggcttttgctgtgccccttctgctgatctccaggtgagacggcccagacttctgggtctgggtttgaatgcgtgtgatctgggggccaccacctgcgtccaagagaggagaggcttgggcgtgggagcaggcaacgtactgagtctgagggaggaggcctaggctcctggactgctgggtccgaaggaggaggtgggcgggacgtaggactcctggatctgaaggcggaggggctgggagactgaactccttgagcccagacgaggaggggcttaggcgtccacatccctggcttcgaaggagccagacgtttggatataatggaagagcgtgtcaggagtggcttccgttcctgtctccttcagcatcctgatggcgtacactgtggctctggctaactcctacggacgcctcatctctgagctcaaacgtcagagacagacggtgagccaggcgggtccctgagagggcccctggggaacatggaaaggggttggggaagaggattgtctcacctccacctctctttgccccaggaggcgcagaataaagtcttcctggcacggcgcgctgtggcgctgacctccaccaaaccggctctttgacccccgcagcccacgtcccgctttcagaccccaggcccattgtaagcctaggtcacaacatctgtaaactaggagaactggagaagactccacgcccttccagctttggtatctggagatttccagggcccctcgccgccacgtcctgactctcgggtgatcttccttgtatcaataaatacagccgaggttgctgagcgcgctttgaaa

SEQ ID NO: 1946 - DNA, 5360 bp, Homo sapiens
gtccacgtgcggctgcgccagcgcatcatcttgtacgaattaaaggtgcgattagggagcggggtctgcaactgggtagggaccagacaggaccgggctgagataacgcacagggcctaactcggtgatggggcctccggagagatgctaagcagctccttctccaagaaaggcaggtcctggggaatgagaaggttgagaggaggccgagatagggctccccgagctccaagcgtgtaggaaaaggatgcgccagggctgggatcggtggctaatgcttgtaaccccagcactttgggagcccgagacaggtggatcgcttcagtctaggagttcgagaccagcctgggcaacataggggggctccctctctcccaaaaaaaaaaaaaaaaagtttgtttttttttaagtaagcacaagaagcgggcggggcctaaggcaatttggttcaaagttaagtgatgggagcggccagcagggcgtcttgatacagctgaactggaacttcaggccaggaataaagcgcagggccacctgggggcggactctgatgggcagggctgaccaggggcgggtcttgggatgctgggcggactcaggggcggggcctggggtgctgagattgaccgcggagggatgggggcttgggttgctggatccggccgcgaaggggcggggctgtaaagggccgctggtttcctggagcaggtggaaccaggactgcagaggttgttagcgggtggggagacggctgcatcagttcacgttaaggaggatctctggagagccagacctggggaaccgggaggcccgcgccttgggaaatggagtccaagcgggcatctctcctgccttcaggtggagctggaggagacagtggtgcggcgccaggctgcggtgcggacgctgggccagcaagccagggtttggttggtgcgggtgctgctcaacctgctggtggtcgcgctcctgggggcagccttctatggcgtctactgggctacggggtgcaccgtggagctgcaggtgcggacggtcttggaagaggaagccagggggtcctggaacctacatttccaacggtggagggaggggacggaagtttgggatgccagagatcttagagaggaagtatgggagagggtatgttcggaccctggacttagggattttaaaggaaaaagagaggctgggcgcggtggcttacacctgtaatcccagcactttgggaggctgaggcgggcggatcacgatgtcaggagttccagaccagcctgaccaacatggtgaaaaacagtctctactaaaaatacaaaaattagacgggcgtggtggtgggcgcctgtaatcccagctactcaggaggctgaggcaggagaatcacttgaacccgggaggcagaggttgcagcgagccgagatcgcaccgctgcattctaggctgggtaacagagcgagactctgtctcaaaaaaaaaaaaaaagaagaagaagaagaagaggccggggggaggaccttaagcttggctcctccaggaccccaagcctctactcatggtccatcccgctcccaggagatgccccttgtccaggagttgccactgctgaagcttggggtgaattaccttccgtccatcttcatcgctggggtcaattttgtgctgccgcccgtgttcaagctcattgctccactggagggctacactcggagtcgccagatcgtttttatcctgctcaggttccagcctcacggggatggctgggaatgatgaagggtgggggcggtcagagggatgttggcgctgacaggtaagacacggaaatcctgctgataccgaatccagggattcaaatcctgactctgttggccaggtgcagtggctcacacctgtaatcccagcactttgggaggccgaggctgaggtcaggagttcgagaccagcctgacaaacatgatgaaaccccgtctgtagtaaaaatacgaatattagcccggcggtagtggcttctgtagtcccagctactcgggaggctgaggcaggagaatggctcgagcctgggaggtggaggttgcagtgagctgagatcgcgccactgcactccagtccgggtgacagagtgagaccctgtctcaaaaaaaaaaaaaaaaaaagaaagaaagaaagaaagaaatcctgattctgtcactgggcctcagcttcatctgtgagatgggttgaatgcgggcgcgttccactgagaagggaactgccacatggtgggtaccgggtcagggcccattctctgccttccccccttcaggaccgtgtttcttcgcctcgcctccctggtggtcctgctcttctctctctggaatcagatcacttgtgggggcgactccgaggctgaggactgcaaaacctgtggctacaattacaaacaacttccggtgagaacggcatgggtgtgcgtgggactcttgggtccctgaaggaaagatggagctgggtgggtccagactcttggtttgggcggagaggggagcttggggtgctggaacactctcccaagggtatgaaagtttgaaaaacgaggacccccagagaaagtattgacagggtctcataggcttgcgatgtggagactcggacgcgtgggcctccaggtgcccgggtcccgagttctttctgatatatttcttccttcttcagtgctgggagactgtcctgggccaggaaatgtacaaacttctgctctttgatctgctgactgtcttggcagtcgcgctgctcatccagtttcctagaaagtgagagccccgccccttgctgtggccccgcccctctaggacgaggccgtgccccatcgcgctgttcttttcaccgcgcacctttttaccattcccgcctctgcctgctccctttgcttgccctaggtccgcagatctccccgctccccgcccttgttttagtgggttacttccctctggccccgacggcggcgacatctgggtcccttctagtcctcaggacccgccctctggacacaccccctccacgtggagtcctgaaagtcccgcccccccccccccaccaccaatacgcatgcttcctattggcgggcggggcggtggaggcgtggaaatccaggccgccactcccctgactccggcccgccccgccccgtccttcaggctcctctgtggcctctgtcctggggcgctgggtcgtctggcggggacccaagagttccaggtgcccgacgaggtgctggggctcatctacgcgcagacggtggtctgggtggggagttttttctgccctttactgcccctgcttaacacggtcaagttcctgctgcttttctacctgaagaaggtaaggggtaggggggacccttgggtctgaggcaggaggtattggggcccgcactcctgggtcaagggcaaggaagatcctgggggcctggattactcggtcctgagagaggagggggttggaggacagactactgcatctgagaggaggggtctagggcattctgacttatatgtctgaggatctggggactcagactccggggtcctagatgaggaaggggctcagactcctggttcggaaaaaaggagaggcaggtaggccgggtgcagtcgtcacgcctgtaatcccagcacttcgggagactaaggcgggtggatcacctgaggtcaggagtttgagaccagcctggctaacatggcaaaaccccgtctctactaaaaatacaaaaaaaattagccgggcttagtggcaggcgcctgtaatcccagctactcaggaggctgaggcaggggaattgcttgaaccagggaggtgaaggtcgaagtgagccaagatcgtgccactgcactccagcctgggcgacagagcgagactccgtctcaaaaagagaaaacaaacaaacaacaacaacagcaaaacaaattagccgggagtggtggtgcacacctgtaatcccagctactcgggaggctgagacacgagaatagcttgaacccgggaggggaggctgcagtgagagccactgcactccagcctgggcgacagagcgagactctgtctcaaaaaaaaaagcctgggcgacagagcgagactctgtctcaaaaaaaaaaaaaaaaaaaaatggaggcacagactcttgtgtttcagagcccttttctccgtgccttcccccaccagcttaccctcttctccacctgctccccggctgcccgcaccttccgggcctccgcggcgaatttctttttccccttggtccttctcctgggtctggccatctccagcgttcccctgctttacagcatcttcctgtaagtgcgagaggctcccgcctctctccctccctctctccccattcagtgttcagactcctggcactatgtgagcccagcctgtcttgacttcaggatcccgccttctaagctgtgtggtccattccgggggcagtcgtccatctgggcccagatccctgagtctatttccagcctccctgagaccacccagaatttcctcttcttcctggggacccaggcttttgctgtgccccttctgctgatctccaggtgagacggcccagacttctgggtctgggtttgaatgcgtgtgatctgggggccaccacctgcgtccaagagaggagaggcttgggcgtgggagcaggcaacgtactgagtctgagggaggaggcctaggctcctggactgctgggtccgaaggaggaggtgggcgggacgtaggactcctggatctgaaggcggaggggctgggagactgaactccttgagcccagacgaggaggggcttaggcgtccacatccctggcttcgaaggagccagacgtttggatataatggaagagcgtgtcaggagtggcttccgttcctgtctccttcagcatcctgatggcgtacactgtggctctggctaactcctacggacgcctcatctctgagctcaaacgtcagagagagacggtgagccaggcgggtccctgagagggcccctggggaacatggaaaggggttggggaagaggattgtctcacctccacctctctttgccccaggaggcgcagaataaagtcttcctggcacggcgcgctgtggcgctgacctccaccaaaccggctctttgacccccgcagcccacgtcccgctttcagaccccaggcccattgtaagcctaggtcacaacatctgtaaactaggagaactggagaagactccacgcccttccagctttggtatctggagatttccagggcccctcgccgccacgtccctgactctcgggtgatcttccttgtatcaataaatacagccgaggttgctgagcgcgctttgaaa

SEQ ID NO: 1947 - DNA, 22001 bp, Homo sapiens
ggaagtgcaaagaggcgggcgtgccagtccctggacagctacgacgccatgaatatcttgcccaagaagagctggcacgtccggaacaaggacaatgtcgcccgcgtgcggcgtgacgaggcccaggcccgggaggaggagaaggagcgtgagcggagggtgctgctggctcagcaagaggtaagctcggaagccggcagggcggcgctccggggcccagcgcgcaggcgccgcggttgggggccggaagcggaggcgttgcgcaggctcaatgtgccccgtgtgaaattcgggaccaggcgccgatcccactttcgaggacgttgccccgcaaaccttgtgcccacttccacgaaaccttccttgatctcgccctcgtcttagtttttcccccactgatgtatttcacatggctggaacagtgtctagcacaaaagagaagcttaacatttaatgaatccgtgaacccttggacagttcaaggaaattcggatcactttttagtttgcctgcacagcctatttattgagcatctactgtatgctaactacatgccgtgcacctgacttgcggaatccccaataagcactgttcgttcttagaggggcactgtcatctctgttgcacgaagtgagatggcttcagtgaggggaaggcacattttaaggagaggcggacagccaggctccacgccatcgggcgagccctttcgtgcaccgccccctagacacatacacacaaacacgggctttccgtatggctctttaaatctgtttggtgtacacccaactttcatttccttagctagtctgatcctccgccgtgggtgggaggtagtctaggtttttagaatctcagtaggctgctgagcgctgtttgaaatccgcgtcctgaaggcaggggacagggcttcagcagacttggggtagtcacttggagccatggctagaattcagatcgtctggcctaatgcatacctttatggctgttttaattgtctcacttgaggttaggaacccctttggtttaggccagggacctcctcccatacatccttgatgacccgtggtttactatttgaaagggagtttacaaaacccaggcgttgcctcatctgcctaccctcacccccagctaggacaggtgcctcttttaggcgcctagtgctccctttctcataaccccagcaccctggactgccattttctgtggtgggcaccagactcacagttcttgaattacctctaggttctgaatgtcctgcctataactttctccccaggcccgtacagaattcctacggaagaaagccagacatcagaactcactgcctgagcttgaagcagcagaggcgggagccccaggttctggccctgtggacctgtttcgggagctgctggaggaagggaaaggagtgatcagaggcaataaagagtacgaggaagaaaagcgacaggagaaagtaagctggcctcacccacttcatcagaggggccatgaatcgagttggagggagggggcactttagccattggttgtgaccaaggtcaaacaagagtgaacacacagaatttaggaccataccaaggcatgacactcaaaaagcgttggctattgccgtctgggcgcccacaggggttggaggtagatgctagaggtccccagctgctgggcaaaccgctcagttctccaaactggaggagtctcaaacctgatgggcttttaaaaatttaaatcagccggctgtggctcacgcctgtaatcccaccaccttgggaggctgaggcgggtggatcacctgaggtcaggagttcaagaccagcctggtcaacatggtatctctaaaaatacaaaaaaaattagccgggcatggtggtgcgcgcctgtaatcccagggaagctgaagcaggagaatcgcttgacccaggaggtggaagctgcagtaagccgagattgcgccactgcactccagcctgggtgacagagcgagaccccatctcaaaacaatcaaacaaaaagtgaatcaatcgcctcttgctttttggctaagatcaagtgtaaaaggtacatcagtggctgtgcatggtggctcacgcctgtaatcccagcactttgggaggccaacgtgggtggatcacctgaggtcagaagttcaagaccagcctggccaaacatggcaaaaccccgtctctactaaaaatacaaaaattagctgggcatggtggtgtgtgcctgtaatcccagctactcggggggctgaggtaggaggattgcttgaacctgggaagcagaggttgcagtgagccgagatcgtgccactgcactcgagtctgggcaacagagcgagactccatctcaaaaaaaagaggtacatcagctcttgtcatttatctgctgtctctggacttgctgaccccacccatcgctcctctgctttgcttgatcccttcaggcttctcttcaagtctctctgcaaagatgcctgcctctgaacactcaagtggctccacttgtcccctccttcccctgctgttactgtacctgctactgtccccccagggggagctttgcctctgtttgtcttccatccccagcacctggtccaactggttcataacaagccttagatacctgttcgcttagatacctgtgtcagggagacacacctgacaccttgaaagattatatcacatctcttgtatttcctggccccctcaggagaggcaagagaaagctctgggcatcctgacatacctgggccagagtgcagcggaggcacagactcaacccccttggtaccagctacccccagggcgagggggccccccgcccggcccagccccagatgagaagatcaagagccgtctggaccctctgcgggagatgcagaagcatctggggaagaagagacagcacggcggtgatgaaggcagtcgcagcagaaaggaaaaggaggggtctgagaagcagcgacccaaggagtaagaagaccccacctcggcagaccagggcccagaccttcagggcttggcagcagcccagcatgggcactgcagcgtctctggtcaggacagccagggactccgtgaagggctggctaggtggagaagtggttctcagcatgtggtccagggagccctaggggtcctgacaccctttcccggggtgctgtggtgtcaagcctattttcctgacactggtggacttttccactcgtgttctcaggcatgtagtgcaggtttccagaggctgtgtgatggggagacaccctcactctgatggccaatggcagatgcttgtgtccaaactttcttagttttcactaatgatttgcagcatattaagagaacccatttaaacaaaagctcttggggtccttggtttttaagagtataaaggggtcctgagaccaaagagtttgagagctgctgggttagagagtaaaagcaggcttctgtctccaggatgctgcacccctggtctagagggggtacactgcctgtagtcttctttcctctagaaagggaaactgagggccagggggctgctaagtgtgctttcttgacctggagaagcatcagattttaaagactggggaggaccaaagcccacagaagggaaggccagagacgtgcccatggcgtcccagcaccaagtggctgcttccagcaggcctaaggagctgaggctggggtgtgctggatgcagcggggcttccaggcggcagctccctctatgggagaggttgggggaatggcctcctaggggctaccagctttctgacctcactcctctccccacaggcctccatccctggaccagcttcgagctgaacgtctgcggagggaagcagctgagaggtctcgggcagaggccctgctggcccgggtccaaggccgggcactacaggagggtcagccggaagaagacgagacggatgaccggcggcggcggtacaactcccaattcaacccccagctggcccggcgcccccgccagcaggaccctcaccttactcactgactcctgagggggtacaggagaggccgctgctgccagccgtcatataaaactatttattcataaatattttccaaaatgaaaataggtttaccaaaaaatgtccctcactggggaggggaggagggggcagccctcgcccccgggcccccagggtggggctgagaggaaaacctcccggccccctccctgcttcctgggagagggggatgccccgtggcttggggcctccctccagtcttccagggcagggccctcacctgggcagggggatcagcatgcgggggaagggggtgggtagagggaggggccggtgtcactggaggtcccggtcctccaggtagcggtactcaaaggtgaagccttccttcttccgctggccccacttctcgtagtcaaagtagatgtaggtgccctggccgggggagaaggcggtcagtgagtggacgaggaggtggtctgggatctgggccggaccaacagacaaaggggacaattcttagggctgtggatgtgtcaggcaccgggccagctgccctgcacgcacacactctcatccatcctcacaaggttcttcttgggtaggaaatgttatcatgccacttcagcgaggaggaaacggagggggccgcagaggttccaccgaagccagctgccagaacggggccccagccccaggtgtgagtgcacagccttcgtttcctcgagggctgtggcttttgagcacctctcacgtgagtacaggatgcacagcctagcatttaatcttcacaaagacctcgaggcagtgggtactgtcacccttgttctagagaatggaacagtctcagagtctaaatccaagcactctgcagggacattttattggtgacggaagtggtgtgggaatttctgaatgactggatgccctgaaatgtactaacttggaggatggttttgggccaaaccaggaaaggacaggaagtctgtggttaacatctgaggacacaatgggagaggacctaggttctaaatgaatgtcttaagtgcttcaaagatggcaacctgggagaaccaggagaggggactgagttctctgaggacaaggaccttgtactacttcatccccatgaaggggctcggcatcagggaagtatttggtggaaaaaaacatcactgtagaacacaccaactgaaagtaatttgaaaaaaaaaatccatgacactgactatgtagcagtcaccattaagtacttacatgttattaactcatttaatcttcataacaactgcattaggtaggtggtcttccccccatttttacagataagttaattgagacacagaggttcgagtgacttgcctagagtcgcccagctggactgggctgaaacccaggtaggttggttccagagtgtttgcaagcagcaggaatttcccagtattagaacttgagaagcccattcaaaaaaaatagtttcggcactgagcccctgccctgctgagtgctgggacctggaggtgaagtgggggccatcaaggtccctcggcagcagagcccacagcctggtgcagggacacatactgggaaaatcccacaccccaagcgagtgtgcccagcactgcaaaggggaggcactgggctgggtggctccaggaaggtttctttgaggaagggacatttgggctgagacctacaggaggcctaggagctggccaagtggaggatgagagggcggtgttccaggctgagcagacagccagagggaggagtacttggtcaggctgagggactgcgccagctgaaaggtggaggcaagggagcagaggccagcaggggctgcctggagcctggggactctaccccaaccctagcagcgggaagagagggggcggggccctcacctgctcaaactcgtcagtgatggtcttgggctcctcgtgcctctggaaccacatcatgtacttggtgtggaatcgccatgactgcttctttagggccttggctgccagatactgtgccttagtgccctgggggaggaacagtggagagggggatcagggggcccccaaactgggtggggagccaggggaatggggcaggacatcagggctgaaccccggcccccgccacagaccacagttgggctggacaatcctcttggagatggggctgggggcacagaacataccaatgctgatcaggagaaggaaaatgagacaggaggtgaaaattgctttcagagaagctttgagaaggaagaaaaactaatgtgtgatgagagctgagagaggaggcaatttagaaaatttcccaagtggggatgagggtggaggtcactcatgactcactggggttgggagggggctggacagctccccagtggtctccagggaggcctgagaatgtgccgatgagcagagtggggtcggcctagactggggctgctggagcagggctggggaggggccgcgggtgagccagtgggcaactggaagcggggctgaggtgtgcctcagtggaccagcctcgctgtcaacccaagcagttctaacatctctgggctggaaggcggggacggggacaggtggatttggggcaggggcccaggagtgggaatagggagggggtgcggtcccagtggccgcagtggggcacccacctcacccctccagcccgaggggggacggcggcggtggcggcgaagccggggggcccgaggctgccccgggggccctgctgtacctccagatagtagaagatgaagaagagtgtctcggtcgacaggcgctggtagaattccacagtgtccgagtgtgggggtggcatctggtggtggtaggggggcgtcggacaggggttccgggggaggtactgcctgtgagagcaacaggaaggtcagtgccagctgcctactagtcctgtcgtgatcaaaagggtgctcagacatgcatccctgcggggggaggtggtacagaaagacccagggcggtgctgaccttcagtggagagcccaagtcaggggcctggtgctctacccacagcctcacaggttcagccactgcctcctccgtaagactcaagtcccagaccatcccccttccctgtggcccctcaccgaatacgctcagagtcagaggggtgaggcatgtggtgccaggcggcctcttccatggcctgctgatagagctgctccttggtgaggggcacagggcccagtggacagacacccagcgacagcggtatgttcacctctgacagctgcaggggcggctgggctgaggccggaggtgctgatgtactgctcaggatgatgtctgtggggagggtgggggtccggccccctcagtggtgaggatgggtcaggggcagcccctcctctttggcccgctgcttccccaccatcctgggtccctcacctcgctcggtcaggtgcagcgttggcacagggtcctcaatgccagagctgatggctgcccgttccgccatggacttcaaggagctcagaggctcaggggcctggggaggaaacaagaggcctggcctgagcacttgggctgcaggagcaagtgcagcctgacacaggccccagatgctctcacctgccctgtttgggggccgtggagggccaacgacccactccccacaatctacccatgacaggtaaaagcatcaaactgtagggaaacaatcggagaccacgacgcattcatcagcagaggaacgtctcgtgagtgggactctgcagcatggaatactacgccgagattttcaaaatacaagttcgtgacatactacagaagtaaacgccaacctgcagaatatgtacagtgcgctaccatttttgtcaaaggatgtgccaatagtacacgctccttcactagggacacctacacgctgggagagctcccgcctgtcttgaaggaggcaggaggtctacatgctcagctgtctgcctgtgactggcatggggtgactggaatcggggtgggcccagcccggctaggcttcagtctccttgctggaaacaggtaggttgggtctccagccccgcagccacagcctcgtttcctattacaaaggttacagcaggcttctgttccccaaagtcagggctggttcctcccatctcctccagccacgtgcagctgtcccaaaccccagccctgtgctggactctccacaacgagtcagtcgccaaggcttatccattctgtctcgctatatcgcccaggcaggtctcaaactcctgggctcaagctatcctcccgcctctgcctccctaagagctgggattacaggtgtgagccaccacgcccagctatccgtcctgcttctaaaccccactggatggctcccttccctgtcgtgccaccatgtcccacacagcccaggcctgtcctctcctgcccagaccaccctccctctatcctgtcctcaccagccccaggggacctttccaatgaagtcatgttgttccttctctactccaaaccttgccatggttcccgaccacccaccccagcgattcatttttgttgttggtggtgttaaaagatatggaccccttctgaaaatctcaaagctgctgtttccctttttccagaaaaatgcacgcactataaatatcctgtccacctacttctaaaatttgggccgggcacggtggctcacacctgtaatcccagcactttgggaggtcgaggtgggtggatcacctgaggttcggagttcaagacctgcctgaccaacatggcaaaaccccatctctattaaaaatataaaaattagcctggcgtggtggcaggcgcctgtaatcccagctactcagtaggctgcggcaggagaatcgcttgaacccaggaggcggatgttgcattcagctgagattgcaccactgcactccagcctgggtgacagagcaagactctgtctcaaaaaagaaaaaaaaaaaaaattaatgcttctgttgggccagaaactgttccaagagctttatgaggatgatttagtcttccaaataaccctacatagtaggtataatcgtgactattgccgtttcccagatgaaggcacagaaaggacaatgccaagacttggacctggacagcctgggcgcgcacactgcctcctggacagcctgggcgcgcacactgcctcctggacagcctgggcatacacactggtccccccatggaagctgcgctacagtatactggctcacaagccaagccccagctcctgaccctcgatgatcaggaccccaccgtcctatcctgctacacccactatctcagccctgcagctggtggcactgtctcctgcagagtggacacctctctcctctctgctgcatcctgcccagcttcctaagcacacaggcagatgcatgctcctcctaaagcacctcctgaagcccttcctgcagctgttagcccccctgcctggtccaggtctcagcttaaacatcaccccctctcagaccttcctgggcctgtctcccaggtcaggtcagatgcccctcggtgggcccaccgcaaccttccctgcagctgccccagcagggaagcttcctaaagggtggaaccaggctgcattcacccaaccagtctttctacttgtgcagaaagtacaccagtctatgccttgtgaggacaaacggggacagaaactgagggcctgcgggggggatgaagatggagacccagagagagcaagcaacaagtgcaaccaagagaaaggaaaagagacccagagaaacagagctttggagggaacaagagaggaggtatgagagcccccagagatcaaggtcacggggagggtggtacagaaagacctggagaaagagcaagtgtgagaaggggacagaaagccagagaaagagatccagaaagagggtgggggcagggggtgcagctagagacctggaggaaagaaacaacagagtcaggacacagaggctcgggggatgtccgaggagcccaccttgatttctggggcggtgctgaactgtggaggcccattgagcagggcaccggctgccttggcatcactgaagctgggcgttggggagctgggaggattcacaggcagtggcaccaggaggctgggtccccctgagttgttccctgagcctggggccacgcccccagcccccgttggggctgccgcactgggttccttcctggagagagagcatggaagagggggttgagaggagggtccctgagggtgggatgggcagagaggcctggctggagagaggggagactgcacagatcagatgggatctgagaggggcaggtgagggcagacagatgggagaaagaagtggttctctgggcaaacaaaggcagagcccaatctttggaatggtttctcatcagcagagcagagctgtgggggtgggggtgaggattctcgggtgctccaccaggccacaggctgatcaaaaccacttgccctgggcaggtgttcacagggcccactcccccttgggcaggccagctggagctggggtgagggggcaggaagcaggcctttcctttgtgcacactgatctttcttagggcattcttcgggaaacaggcagacccagtggaatggtctgagctaagatttgaaggagtggctgcagaggaataaggacttcgggacaattcactttgaaaagtgaaacagtgaccctccggtggcagtcaattggcctcaggcaggtaacagaaatggggaggaaagggtatggggctcttgagaaaacttccacttagatgagaacgtattttagaatgttctgaagggcaaagcagggaggctgatgtagtttccttgctggaaagaagtgggggtgtaacacccgagggagatggaggatagcgcttggccattcccagcagcaagggcggggggttcagaacccaccgatgcgggggtgaggcgcctgcgcctctctgtttcaaaaggctgccatcccaaccctgccgatggccgagacactcacgaggtgctgggaggtgggttgtgggggccggaaggggggcccaaggcctggctgctggcattgttgcccccactgctgctcaaagccacctctgccgggctgtctgccacaactgagctgtaacctgggaacaaagagtaaatggaaagggctgctgcctgctgcccagccccgcccacgccccccaccccgctgcctcctcactcactggtggcgccattctgcttgccagcccctccaccggcactgctgttactactgctgctgctccctccacctccgctgccgccgcctccgcctccgctaggctggacgctggggggccggggctgggtcgtgctgggcccactgggagctggtggggccacagcctgggcatagggagcaggggtgcccgagttgtggctgggagctggactggccttggggcccagggcacttgggggtgctgcgggggcggggaccccattgttgccaggagtggtgctcaaggcagaggcagcaggcggggggccggaggggtaggtgggcggcacagctggggactgagggtgctggttgctgtggacaggcttggagccgtttttggctggagactgcgggtgggagagagcagagggtcaggacccagtgggccagctggtctccctcaccacccccacctcaggctccatctttgtcccagcagcctcctctctggcctcgctgcccccacctgctcctgccctcttggggacctgggtgaccttactcaccctcatggcttcaatcaccttcatgcttaaaacactcacactgatttccagcctgcccagcttcccaagtcctgcctggacaccgccccatggacacccccacagggatctgacacacaacttaggttgtcagccagagaagatccatctgttggaagccagaggactagtgggaaacacttaagtgttctcaatatgagattagctggagccgcctaatgtccaagagtagaaggaaaaacagctggaaattggatagtaattctgaatgtcacctgaagggtcacagaagctactcacagggctggaagttaccagcactccagaaagtggtgggagggtaaatgtgctcatggtatccctaccgcaggcaatctgtggacagcactccggctgctgagcctaaccacctcctgggcttctttccagccaccccacaggcaccttgcgcttaccaagcgcccaacaggactgactacccacttctctcctgggcatcgctgcttggcagtgggggcctgggaaggtggcagagcccagcctggcccctggagtacctgcctcagtgtctctcctcatcacctcctggccctgttgcccgccctcactactacctgcgggtccccttagtctccacaccagcctcctcaatgcccactcagggtgtccccttggaaccatccatcccgttagcccacagaggggcctcaggcccatgctgctcctgcctaacattgttctgtagcagcgtttccgaaagcgtgctcctgtcctgggagatgttaaaggagttgaagaagcactgcccgccaccgtctcctctcagaaatttgcagtgtgtattatcagcacagcaaaggccccatcgcttcctaggcttattggactctggaggccactcaggtccacaaagcctgagcccctcagcctgacagtcccagtccctgtgctcacagttgggcccctggccctgcagacctggccagactcatctctcctcacttccaaactttctgtcacaacttgcccatgttactggctgccacctctccctgccaggcaaactcacctgactgtgaagcccagggcactccacagcagcatctcctgactgcctggccaggccaagggtgacctgtgtgctacccccttgaccacagcaccagtcacctgtccacttgccctgcccacctgccctcagggcagcactgatttctgagccacctgtgtccaccagcccagcacagtggccggcgctcaggcctcaagatgcctttgggaagcaacagaggagtgaatggcgtgcccacccggtccaggctcacacccacctggctgacttcactgtctgtggaacgtcccctcttcttatcatcttcagagttttcctgaggtaggggaggcagaatagaaacctgtgtgacctctggggctctgatggagaaccgccaatctctgaatgccccggggacctgggcccaattgactgccattgcggccccagagctggtcaaatggctgtccttaatctgcctggagaaaccatctcaattcaggctctccagtcttcttgttttctgggagccagcactgacccaccagcctcttaaggatctgggaacctgctctccacagggaagccaacccttggatccctgcccaaggtggccagctacccagcctcctcaggcagcccaggcaccggcccctcccacttcccagatccaggacctaaactggcgcgggatgcaccctattgctctttatgtcctttagggacccagatataggaccttagcgtgtgctccaagagcctagaccctggatacctagatctgtgtttcctcaattacgctcccatagccactttggagtgacccagatttgtctcctcgagtcctgccctgctggaaacacaaggtactagtgtcccgtggggcctcaccgtggtacagttggctgggctgggcgggatgggagagctggaggtggttgaggtgggcgtgctgctggactggttgaagatctcatcctccatgtggctgtggctgggaggggaggtggcgaccagcgcctgtgctgtgggggcagaagaagggcatgcttagctggctcacacagcccattctgggccctcacttcctgtgccacgatcagccccagggcctcacgaatgtcctcgaggtccaggtcatcgtagagaaactcgttctcctcgaagtcggggtcctgggatgagtcaacatagtactcaacgtcgtccttgatcttgcggatggcgtcaacgaggatggagtcattgtccagcatgcgcaggatggtctctagcatgcgcacgtggtagcggtgcttctcgatgtgccgcttcaagccctcaatccggtcctgcttctgctggcgagcccagggccaggctcaggggctgcagagcacctgcttggcccctcctgcccccacagaacctgtcctcagtccctgacccctgtggagacccaaagcctccacgccatccccttcggggtggggcagtatggggtccacccaccctctgagccctgtggggaccaatcttagccttgacatcttgggatcccactgctccctcctctccccacacctttctggctccaggagtccttggaaacctctaaaagacccagaggtccttgtgccatcccacgacttggcctccatctgcacctcacctgacagcccagatttctcaactgagcccgcccaccactgtgactgcctctggcatacagataccctccgacctgctccagcagtaacaatgataacccccatttgtgaggagcttgctgtttagaattgtgatatctgtcatcactaggcccccaaccctacccatttatccctgagagagcccagattcctaagcctcgctcctgccctcccctcaaggcccctttaggatttaacatcttagccttggttccaaatctctgctctgttcaaggacccatcatctccccgaaagcccctggttcccaaacccctcagagtctgacacccaaccctgtcatcttccacttcctgaccctctcccacccacagcttccctgaggacccggctctcccctccctgtctttctggtttcagcaagtctgtacagtttgtatccctttgaactcataccccacaatcccggattttagaacctgggaccccaacatccagctttgtcccagactcctgtcttccttcaggcctggttctctgccttctccatgttctgccttgtctctacccactgtgctctccctaggaccagggccctctgggtgccaggaggcctcttgccatgggtgtccttcaggtctcacttttactctgtggcccaagctcaacctgcactcaccttcccccaagtcgctcctcttcacaaaggccccacggtctacccagacacccaggggagcctgagattctgtctgacctccttcctgccccacgcgtgcagctgctaagccctcccaatcctgtctctcaaatccctaatcccggctgttggccctgtccgcctgaggaatccaggccccaactcccaggagcataaatgactggcctcctgctggccagcccattcccatgcccatccccatcccaaaggtgtcgggtctccctcactcacatccttgtcgcccttcttcttgcgtgtctgcactgacagtgactccacttcactctcaaactggtccacctgcatgttgagcgtgtcgatggtattctaggggagggagaggaagaggaagcccatcagctagggttccgcctacacccagggctcaggatcctcagagttcacctcctcttctctaccccaactcaccgtgagccactggccaacctcttccttctccttctgggcaggatctaccttctgggccaggcccaggccctctttgctgtaagctttggttttggtctctcgttccacaactttgaaccgttccatttgctgtagagagtgcagttggcaggggggctctcaaaggtgggaaaggagctgactaagggccagcagacactccgacctgagcctcgtgaccctactttctgagctctgagtccgctgcctcttcacttcccttaggtgcagaaaccttacttctcttgaggacctctggggtctggccgctctgcctccgccccttgggatctcaagaatctggtgaccttcccacctctctgggactcaggctctgggctcctaccgtctcaatgagcttgcggttgtctataagctgcctcttgtccttgatctcgttggacgctacccatgtcttgatttggtccctcagccgctgcagatgggaaaagcaagaaagtcagacctcaggacccaggaactggggcccacagctccttctccctgggacccagcagtccactctcccagttccctctaccctcaggacaaaggcgtccaggcccccagccccctcacttgtagcttcttaatctccttctttaggtcagcctcatacttttctttctggttcgcgttggctgcattgtggagctgagggatggagagaattgagaagtcagtgtgggaggggatgtcccagtacccactccagtgattcttccttatgctagggactcgaggaccccccccaacccctacccccaatccatcttagagctgattctcttaggtcctcagcatctgcatatgtagcccctcccgctggtcaacacccagaggtcctgagccgccttcctgtgccctcctctctgaagacccagattattagggtctcagcccctgtaccttctgccaaatatcttcaaactgctccacgccctcggacaccttcttgaggcagcgatcaatctcacctggccagggaggaacaaggctgtgagaatcctgcccaggtggcaggtatctaaagagcagtcctcagaagagggagcatgtggctacaggtgcagcaggaagtcagtctagtaccttggagtttgcgcttgtccgccatcttccctgccctacagacgcactctcttcatactctcttggagacggacgctgctaggagagattggagaggaattaacacgtattccctggctggtaaaaacccagagacatggacctagtcagcatagtgaggtaggtgggactggtaaagagaagaagcatttgctatctgacaagagaccagccccagttctcctgatgctcgcttgactgcccagcatagtgtctggccaacaggggaccccataagtttgttgaaacaagaaaagttacatacttttttgtgtgcctctgactcaggaagtggaaaattcctagagcatggagtaccttctccccagaatacactcaaaaaggtttttcagagcaggacagtcatgctgcacacagctgatgactgggatggaggcattagccctggaaatcacacttcctactcagaggggctgggcagaggtggctaggagaggtcatccctcagacaagtcaggagacaaatgaaactggcagctcacagagaagggcgtgtgtgtgtgtgtgtgtgtgtgtgtgtgtgtgtgtgtaagctgtaggtaggagaagaaagattgggggtgggggaaaacgacggcgagcagagatgccgaaagctgtgaagagctgaacccgctcatgcagacagggctgaatgccaagtagaagggactcaaaccaccaagacatttattccagagcaggatccttaaaccaaaaggaaataacactcctaacccaaagaagctaataccaagaaggcttagagatttgggggcagaaggcagtacccaagagagacctgggagaagacagaaatcttactaagataagagggtgcaaaggtaccgcagctgtgagggagccgatctgcactcatggaggaatcccatagcaagtggattggtaatttagagtcagggagacatagaccatcagggcaggaacccaaaacttcaagagaggagcgtctttattttaaaggaagttacctggaacccagagaagactgaggtcaaaagggagttccaaggagctttagtccaagggaagacataccttagggcctgacagcgagaccaggggagccctgggaagagaggcttatgcctcagaagaagacttctgagataccagcggagattgccctcttcccctccagggagggggcctacaatgaaaagcacagttccctgggatccacgggccgctcccactctacgtgtgcagggcagggaaccctggagtagtcacttactgtaaagacagaaacagccccatactgaggaacaagagcctcaatacagagggaagtcacaccaaaagagtcctcacccacaaagaagggaacatctggcaaacagtgctatccaacagaactttgcaatgctggaaacactctatttgcgcatatctgttggccactgaacatctgaaatgtggcaagtgtaatggaggaactgaatttttcatttttaactagttactaatcaccacatgtgactagcagcaaccatatgggacggatatgctttagaacaagaagcccataaaggacagggctggtaccttacccccagggagaattttcccaacaccgcagggacccattctgggtgataataggtaggggtgctaccttacacttgagggaatttaaatctcctcagtaaaaggcccaacctaaagaaagccgcagcagcccccgcccaggtcagctatcacgccctacctggggaatctctaagaaggcaaagcaaccaacaaaaggacccaggagaaggtgccacagtggggattcaggctgaggaggggaaagcccctttgacccagggagctcacacaaggcaagggcctggacaccagagctcaggtgtgcagggatcctcaccaaagtccaacaccccaacacagaaaagcctcttactgcatagggggaacaagaatgtgaaacgagagtttacactccctctttccatcccaagaacccaacagagggtcatgggcaggtgctccagcccagagagagaagaggtctcatggtctacacccctaaacaaggcaatcaacaccttaggcaggtgacgccctccctgtgtctccacacggaaaggactggtatcctagtgcagaggaagaatacccacagagaggagaccacactgtggcagcaagagaaggaagtcctggaggggtcacaagccagaaggaggggaacaagagcgctaacccagggaggtgatgtttcagacagaacagtgtgacatcgaagtcggctacagctgagacccagtgaggaggcagctcctccacagagaaggggcaagtgccagaggcccagggtacttgtcccctagagaggctggagccttagccacagtagagacaacaccttccccgctaagaaaatccttatatcatgagggtatctgtacctctggtccccccagcaaaggaccagagagaagggaagctggagcctgagtctcgaagcagagacgccgccagagaagaaagagccccatttgctgtagtcaggggggcatccaccaagatcctccaaggaaggtggtgatcgcaggtccactctcaggcgtgaagaacctgtgctccagcagcaaaggctctccaagagcactgaggaatctgggaacctcggcccaggaggagacttacccaagaggaacacacatccccacagggaagggacccacaaggcgggtggcggggcggggggaggtgagcaggacaccagcctcacaggagccaacacgctaaaatcagagccaaaaccagtaaagaagagccccccagacttcatctcagggaagatgataccaccacacaaagactcgaggagggaggggcaggaggtcagccctgggaaactaacaccgggtggtccttaaccttgggggccgtcatgtgcccacagagtggtctttgtcatgaggcacctttgatctgggagagcttccgcctctgcagcaaggagctctgagaagtgatgttgaagggtgatccttaacccaggtggctgctgacgtggccacacagaggctctgagactccagaagaaggatgcgttagggcctggggtagaggtagtcatctccactgagatgccccatgccaagggtggggggctggaatctcccaccttggaaagtctacaccagagaagtctctggtcccagggacagggtctacagtggagtctcccgcttgagactcaggtatcttacatccacacagccaggaaactatgccttaccccatacagtgacaaatcaagagggggttttggaagcatgagccgggggcacctgcatccgagaggggtcctcagccttacggtggggacacatgcagaggcgtggacacctcaaatccagaaaagcagccataccaataccaaggatggcaagaaccttatccctgggggaggtgacaccaagaaagggtccttaccctggagagaaggcacagccccagagggaagagcccccacctcgcagtacaggaacccgggtctaggaagcttcctactctcatggggtaccagcagcggggccagaaggcgaaacccttgttctccaactgctgacacccagcgtaagggtagatgggaagtcaacaaacccacagtgtgggatctgatgcaaatatcaagggcagtgggcttcttggtccttggagagctgacaccctaaaggaggagactggtgtgaagatggaagaagcctcatactcaggcaggggtgaagggagggaggggagacatcaaaacccctcaccaaaaggacaggagagctcaccccggggtgggtggccgccctgcactgagaggcagggactgctcagaaagaggggctggtgctgcccgcagtgggagctcactaacatggacagcgtggcggcttagtgtctttcaccaggcacctgagcgccaggggatcccagcagcccccagcaacaagaccacagtggtcctgatatcactgggagacgcccacacccagaaggtcggagagtcacgatgcaggggagttcaaggctgcaaagccaggggcagacgccaggatcaaagaagtgtgagagctgagaccagacgtgggccacactgaggacggtcctgtaccccaggtgggggaaagccaaactcccccaaaaaggcaggcgcccagtgcagcgggatggcgaggctggagccacccagggcgctactcgctatgagagggaagagctgcagactacagaggtggaaacttcggcaaaggctccaactaacggggagtttctcctccactcctctcccaagaggctcccatccgatacagacgggcagctggaactgagatccaggggcgaggctgccgcgtcccgggacgccagtgaggagggatgcggaggcgcctcggtcctgggaagggtgactcccccacccagctggggtcctcgtcccgaccaccaccccccctccccgccaccgtcgagggagaagccccggcgcggagctgccccacaacgcgaaggaccgaggccgaggggggcaggcacctgagccccgagagggcgggcacctgggaccaggggcgcctccatccttccagccaggagccataccgacgcggagaggggcgggcacctcgcgcccgggaggcttcgcaccctcacacccctaccggggggcccgacgcgatgccacgcggggaggcggcggcgggcggggcccggggctccgggctcgcggaaggacccccgggaggcgctgaggaacgtgaaagaggcgcaggaacgggagggcgagagggagggagccgccccccgccgggagccccgcgctgcagaggcggcggcagggggcaggcgaggggaggccatgtcgcgacagacggcggtgtcgccagggcgggaggcggcggggagggcggacgatggcgccggggggaggaagggaaggggtccggcccagtcgagcctgacgctctcaccacaggagctggcgccgccgctgaggagcgtatcgcgacaggcgggggaggcgagcgcccgccgcctttttctcgcgccccgggcccgggcgctatcgcgatagcggcgcgtatgtcggatagtgggtttgtttgattgggcccggggttgttctgacgacgggggtcggggctcaagggaggccgcggcgtctgccgatggctccgcggaagctgaccgggccc

SEQ ID NO: 1948 - DNA, 13994 bp, Homo sapiens
  misc_feature (156)..(156): n equals a,t,g, or c
  misc_feature (10132)..(10132): n equals a,t,g, or c
  misc_feature (11830)..(11830): n equals a,t,g, or c
ggaagtgcaaagaggcgggcgtgccagtccctggacagctacgacgccatgaatatcttgcccaagaagagctggcacgtccggaacaaggacaatgtcgcccgcgtgcgacgtgacgaggcccaggcccgggaggaggagaaggagcgtgagatngggtgctgctggctcagcaagaggtaagctcggaagccggcaggcggcgctccggggcccagcgcgcaggcggcggttgggggccggaagcggaggctttgcgcaggctcaatgtgccccgtgtgaaattcgggaccaggcgccgatcccactttcgaggacgttgccccgcaaaccttgtgcccacttccacgaaaccttccttgatctcgccctcgtcttagtttttcccacactgatgtatttcacatggctggaacagtgtctagcacaagagagaagcttaacatttaatgaatccgtgaccccttagacagttcaaggaaattcggatcactttttagtttgcctgcacagcctatttattgagcatctactgtatgctaactacatgccgtgcacctgacttgcggaatccccaataagcactgttcgttcttagaggggcactgtcatctctgttgcacgaagtgagatggcttcagtgaggggaaggcacattttaaggagaggcggacagccagctccacgccatcggggagccctttcgtgcaccgccccctagacacatacacacaaacacgggctttccgtatggctctttaaatctgtttggtgtacacccaactttcatttccttagctagtctgatcctccgccgtgggtgggaggtagtctaggtttttagaatctcagtaggctgctgagcgctgtttgaaatccgcgtcctgaaggcaggggacagggcttcagcagacttggggtagtcacttggagccatggctagaattcagatcgtctggcctaatgcatacctttatggctgttttaattgtctcacttgaggttaggaacccctttggtttaggccagggacctcctcccatacatccttgatgacccgtggtttactatttgaaagggagtttacaaaacccaggcgttgcctcatctgcctaccctcacccccagctaggacaggtgcctcttttaggcgcctagtgctccctttctcataaccccagcaccctggactgccattttctgtggtgggcaccagactcacagttcttgaattacctctaggttctgaatgtcctgcctataactttctccccaggcccgtacagaattcctacggaagaaagccagacatcagaactcactgcctgagcttgaagcagcagaggcgggagccccaggttctggccctgtggacctgtttcgggagctgctggaggaagggaaaggagtgatcagaggcaataaagagtacgaggaagaaaagcgacaggagaaagtaagctggcctcacccacttcatcagaggggccatgaatcgagttggagggagggggcactttagccattggttgtgaccaaggtcaaacaagagtgaacacacagaatttaggaccataccaaggcatgacactcaaaaagcgttggctattgccgtctgggcgcccacaggggttggaggtagatgctagaggtccccagctgctgggcaaaccgctcagttctccaaactggaggagtctcaaacctgatgggcttttaaaaatttaaatcagccggctgtggctcacgcctgtaatcccaccaccttgggaggctgaggcgggtggatcacctgaggtcaggagttcaagaccagcctggtcaacatggtatctctaaaaatacaaaaaaaattagccgggcatggtggtgcgcgcctgtaatcccagggaggctgaagcaggagaatcgcttgacccaggaggtggaagctgcagtaagccgagattgcgccactgcactccagcctgggtgacagagcgagaccccatctcaaaacaatcaaacaaaaagtgaatcaatcgcctcttgctttttggctaagatcaagtgtaaaaggtacatcagtggctgtgcatggtggctcacgcctgtaatcccagcactttgggaggccaacgtgggtggatcacctgaggtcagaagttcaagaccagcctggccaaacatggcaaaaccccgtctctactaaaaatacaaaaattagctgggcatggtggtgtgtgcctgtaatcccagctactcggggggctgaggtaggaggattgcttgaacctgggaagcagaggttgcagtgagccgagatcgtgccactgcactcgagtctgggcaacagagcgagactccatctcaaaaaaaagaggtacatcagctcttgtcatttatctgctgtctctggacttgctgaccccacccatcgctcctctgctttgcttgatcccttcaggcttctcttcaagtctctctgcaaagatgcctgcctctgaacactcaagtggctccacttgtcccctccttcccctgctgttactgtacctgctactgtcccccagggggagctttgcctctgtttgtcttccatccccagcacctggtccaactggttcataacaagccttagatacctgttcgcttagatacctgtgtcagggagacacacctgacaccttgaaagattatatcacatctcttgtatttcctggccccctcaggagaggcaagagaaagctctgggcatcctgacatacctgggccagagtgcagcggaggcacagactcaacccccttggtaccagctacccccagggcgagggggccccccgcccggcccagccccagatgagaagatcaagagccgtctggaccctctgcgggagatgcagaagcatctggggaagaagagacagcacggcggtgatgaaggcagtcgcagcagaaaggaaaaggaggggtctgagaagcagcgacccaaggagtaagaagaccccacctcggcagaccagggcccagaccttcagggcttggcagcagccagcatgggcactgcagcgtctctggtcaggacagccagggactccgtgaagggctggctaggtggagaagtggttctcagcatgtggtccagggagccctaggggtcctgacaccctttcccggggtgctgtggtgtcaagcctattttcctgacactggtggacttttccactcgtgttctcaggcatgtagtgcaggtttccagaggctgtgtgatggggagacaccctcactctgatggccaatggcagatgcttgtgtccaaactttcttagttttcactaatgatttgcagcatattaagagaacccatttaaacaaaagctcttggggtccttggtttttaagagtataaaggggtcctgagaccaaagagtttgagagctgctgggttagagagtaaaagcaggcttctgtctccaggatgctgcacccctggtctagagggggtacactgcctgtagtcttctttcctctagaaagggaaactgagggccagggggctgctaagtgtgctttcttgacctggagaagcatcagattttaaagactggggaggaccaaagcccacagaagggaaggccagagacgtgcccatggcgtcccagcaccaagtggctgcttccagcaggcctaaggagctgaggctggggtgtgctggatgcagcggggcttccaggcggcagctccctctatgggagaggttgggggaatggcctcctaggggctaccagctttctgacctcactcctctccccacaggcctccatccctggaccagcttcgagctgaacgtctgcggagggaagcagctgagaggtctcgggcagaggccctgctggcccgggtccaaggccgggcactacaggagggtcagccggaagaagacgagacggatgaccggcggcggcggtacaactcccaattcaacccccagctggcccggcgcccccgccagcaggaccctcaccttactcactgactcctgagggggtacaggagaggccgctgctgccagccgtcatataaaactatttattcataaatattttccaaaatgaaaataggtttaccaaaaaatgtccctcactggggaggggaggagggggcagccctcgcccccgagcccccagggtggggctgagaggaaaacctcccggccccctccctgcttcctgggagagggggatgccccgtggcttggggcctccctccagtcttccagggcagggccctcacctgggcagggggatcagcatgcgggggaagggggtgggtagagggaggggccggtgtcactggaggtcccggtcctccaggtagcggtactcaaaggtgaagccttccttcttccgctggccccacttctcgtagtcaaagtagatgtaggtgccctggccgggggagaaggcggtcagtgagtggacgaggaggtggtctgggatctgggccggaccaacagacaaaggggacaattcttagggctgtggatgtgtcaggcaccgggccagctgccctgcacgcacacactctcatccatcctcacaaggttcttcttgggtaggaaatgttatcatgccacttcagcgaggaggaaacggagggggccgcagaggttccaccgaagccagctgccagaatcgtccccagccccaggtgtgagtgcacagccttcgtttcctcgagggctgtggcttttgagcacctctcacgtgagtacaggatgcacagcctagcatttaatcttcacaaagacctcgaggcagtgggtactgtcacccttgttctagagaatggaacagtctcagagtctaaatccaagcactctgcagggacattttattggtgacgaagtggtgtgggaatttctgaatgactggatgccctgaaatgtactaacttggaggatggttttgggccaaaccaggaaaggacaggaagtctgtggttaacatctgaggacacaatgggagaggacctaggttctaaatgaatgtcttaagtgcttcaaagatggcaacctgggagaaccaggagaggggactgagttctctgaggacaaggaccttgtactacttcatccccatgaaggggctcggcatcagggaagtatttggtggaaaaaaacatcactgtagaacacaccaactgaaagtaatttgaaaaaaaaaatccatgacactgactatgtagcagtcaccattaagtacttacatgttattaactcatttaatcttcataacaactgcattaggtaggtggtcttccccccatttttacagataagttaattgagacacagaggttcgagtgacttgcctagagtcgcccagctggactgggctgaaacccaggtaggttggttccagagtgtttgcaagcagcaggaatttcccagtattagaacttgagaagcccattcaaaaaaaatagtttcggcactgagcccctgccctgctgagtgctgggacctggaggtgaagtgggggccatcaaggtccctcggcagcagagcccacagcctggtgcagggacacatactgggaaaatcccacaccccaagcgagtgtgcccagcactgcaaaggggaggcactgggctgggtggctccaggaaggtttctttgaggaagggacatttgggctgagacctacaggaggcctaggagctggccaagtggaggatgagagggcggtgttccaggctgagcagacagccagagggaggagtacttggtcaggctgagggactgcgccagctgaaaggtggaggcaagggagcagaggccagcaggggctgcctggagcctggggactctaccccaaccctagcagcgggaagagagggcggggccctcacctgctcaaactcgtcagtgatggtcttgggctcctcgtgcctctggaaccacatcatgtacttggtgtggaatcgccatgactgcttctttagggccttggctgccagatactgtgccttagtgccctgggggaggaacagtggagagggggatcagggggccccaaactgggtggggagccaggggaatggggcaggacatcagggctgaaccccggcccccgccacagaccacagttgggctggacaatcctcttggagatggggctgggggcacagaacataccaatgctgatcaggagaaggaaaatgagacaggaggtgaaaattgctttcagagaagctttgagaaggaagaaaaactaatgtgtgatgagagctgagagaggaggcatttagaaaattcccaagtgggaatgagggtggaggtcactcatgactcactgggggttgggagggggctggacaggctccccagtggtctccagggaggcctgagaatgtgccaatgagcagagtggggtcggcctagactggggctgctggagcagggctggggaggagccgcgggtgagccagtgggcaactggaagcggggctgaggtgtgcctcagtagaccagcctcgctgtcaacccaagcagttctaacatctctgggctggaaggcggggacggggacaggtggatttgggacagggcccagggagtgggaatagggagggggtgcggtcccagtgccgcagtgggggacccacctcacccctccagcccgaggggggacggcggcggtggcggcgaagccgggggcccgaggctgccccgggggccctgctgtacctccagatagtagaagatgaagaagagtgtctcggtcgacaggcgctggtagaattccacagtgtccgagtgtgggggtggcatctggtggtggtaggggggcgtcggacaggggttccgggggaggtactgcctgtgagagcaacaggaaggtcagtgccagctgcctactagtcctgtcgtgatcaaaagggtgctcagacatgcatccctgcggggggaggtggtacagaaagacccagggcggtgctgaccttcagtggagagcccaagtcaggggcctggtgctctacccacagcctcacaggttcagccactgcctcctccgtaagactcaagtcccagaccatcccccttccctgtggcccctcaccgaatacgctcagagtcagaggggtgaggcatgtggtgccaggcggcctcttccatggcctgctgatagagctgctccttggtgagggcacagggcccagtggacagacacccagcgacagcggtatgttcacctctgacagctgcaggggcggctgggctgaggccggaggtgctgatgtactgctcaggatgatgtctgtggggagggtgggggtccggccccctcagtggtgaggatgggtcaggggcagcccctcctctttggcccgctgcttccccaccatcctgggtccctcacctcgctcggtcaggtgcagcgttggcacagggtcctcaatgccagagctgatggctgcccgttccgccatggacttcaaggagctcagaggctcaggggcctggggaggaaacaagaggcctggcctgagcacttgggctgcaggagcaagtgcagcctgacacaggccccagatgctctcacctgccctgtttgggggccgtggagggccaacgacccactccccacaatctacccatgacaggtaaaagcatcaaactgtagggaaacaatcggagaccacgacgcattcatcagcagaggaacgtctcgtgagtgggactctgcagcatggaatactacgccgagattttcaaaatacaagttcgtgacatactacagaagtaaacgccaacctgcagaatatgtacagtgcgctaccatttttgtcaaaggatgtgccaatagtacacgctccttcactagggacacctacacgctgggagagctcccgcctgtcttgaaggaggcaggaggtctacatgctcagctgtctgcctgtgactggcatggggtgactggaatcggggtgggcccagcccggctaggcttcagtctccttgctggaaacaggtaggttgggtctccagccccgcagccacagcctcgtttcctattacaaaggttacagcaggcttctgttccccaaagtcagggctggttcctcccatctcctccagccacgtgcagctgtcccaaaccccagccctgtgctggactctccacaacgagtcagtcgccaaggcttatccatcctgtctcgctatatcgcccaggcaggtctcaaactcctgggctcaagctatcctcccgcctctgcctccctaagagctgggattacaggtgtgagccaccacgcccagctatccgtcctgcttctaaaccccactggatggctcccttccctgtcgtgccaccatgtcccacacagcccaggcctgtcctctcctgcccagaccaccctccctctatcctgtcctcaccagccccaggggacctttccaatgaagtcatgttgttccttctctactccaaaccttgccatggttcccgaccacccaccccagcgattcatttttgttgttggtggtgttaaaagatatggaccccttctgaaaatctcaaagctgctgtttccctttttccagaaaaatgcacgcactataaatatcctgtccacctacttctaaaatttgggccgggcacggtggctcacacctgtaatcccagcactttgggaggtcaaggtgggtggatcacctgaggttcggagttcaagacctgcctgaccaacatggcaaaaccccatctctattaaaaatataaaaattagcctggcgtggtggcaggcgcctgtaatcccagctactcagtaggctgcggcaggagaatcgcttgaacccaggaggcggatgttgcattcagctgagattgcaccactgcactccagcctgggtgacagagcaagactctgtctcaaaaaagaaaaaaaaaaaaaattaatgcttctgttgggccagaaactgttccaagagctttatgaggatgatttagtcttccaaataaccctacatagtaggtataatcgtgactattgccgtttcccagatgaaggcacagaaaggacaatgccaagacttggacctggacagcctgggcgcgcacactgcctcctggacagcctgggcgcgcacactgcctcctggacagcctgggcatacacactggtccccccatggaagctgcgctacagtatactggctcacaagccaagccccagctcctgaccctcgatgatcaggaccccaccgtcctatcctgctacacccactatctcagccctgcagctggtggcactgtctcctgcagagtggacacctctctcctctctgctgcatcctgcccagcttcctaagcacacaggcagatgcatgctcctcctaaagcacctcctgaagcccttcctgcagctgttagcccccctgcctggtccaggtctcagcttaaacatcaccccctctcagaccttcctgggcctgtctcccaggtcaggtcagatgcccctcggtgggcccaccgcaaccttccctgcagctgccccagcagggaagcttcctaaagggtggaaccaggctgcattcacccaaccagtctttctacttgtgcagaaagtacaccagtctatgccttgtgaggacaaacggggacagaaactgagggcctgcgggggggatgaagatggagacccagagagagcaagcaacaagtgcaaccaagagaaaggaaaagagacccagagaaacagagctttggagggaacaagagaggaggtatgagagcccccagagatcaaggtcacggggagggtggtacagaaagacctggagaaagagcaagtgtgagaaggggacagaaagccagagagagatccagaaagagggtgggggcaaggggtgcagctagagacctggaggaaagaaacaacagagtcaggacacagaggctcgggggatgtccgaggagcccaccttgatttctggggcggtgctgaactgtggaggcccattgagcagggcaccggctgccttggcatcactgaagctgggcgttggggagctgggaggattcacaggcagtggcaccaggaggctggtccccctgagttgttccctgagcctggccacgcctcnccgcccgttggtgctgccgcactgggttccttcctggagagagagcatggaagagggggttgagaggagggtccctgagggtgggatgggcagagaggcctggctggagagaggggagactgcacagatcagatgggatctgagaggggcaggtgagggcagacagatgggagaaagaagtggttctctgggcaaacaaacgcagagcccaatctttggaatggtttctcatcagcagagcagagctgtgggggtgggggtgaggattctcgggtgctccaccaggccacaggctgatcaaaaccacttgccctgggcaggtgttcacagggcccactcccccttgggcaggccagctggagctggggtgagggggcaggaagcaggcctttcctttgtgcacactgatctttcttagggcattcttcgggaaacaggcagacccagtggaatggtctgagctaagatttgaaggagtggctgcagaggaataaggacttcgggacaattcactttgaaaagtgaaacagtgaccctccggtggcagtcaattggcctcaggcaggtaacagaaatggggaggaaagggtatggggctcttgagaaaacttccacttagatgagaacgtattttagaatgttctgaagggcaaagcagggaggctgatgtagtttccttgctggaaagaagtgggggtgtaacacccgatggagatggaggatagcgcttggccattcccagcagcaagggcggggggttcagaacccaccgatgcgggggtgaggcgcctgcgcctctctgtttcaaaaggctgccatcccaaccctgccgatggccgagacactcacgaggtgctgggaggtgggttgtgggggccggaaggggggcccaaggcctggctgctggcattgttgcccccactgctgctcaaagccacctctgccgggctgtctgccacaactgagctgtaacctgggaacaaagagtaaatggaaagggctgctgcctgctgcccagccccgcccacgccccccaccccgctgcctcctcactcactggtggcgccattctgcttgccagcccctccaccggcactgctgttactactgctgctgctccctccgcctccgctgccgccgcctccgcctccgctaggctggacgctggggggccggggctgggtcgtgctgggcccactgggagctggtggggcacagcctgggcatagggagcaggggtgcccgagttgtggctgggagctggactggccttggggccagggcacttgggggtgctgcgggggcggggaaacattgttgccaggagtggtgctcaaggcagaggcagcaggcggggggccggagaggtaggtgggcggcacagctggggactgagggtgctggttgctgtggacaggcttggagccgtttttgctggagactgcgggtggagagagcagagggtcaggaccagctgggccagctggtctccctcaccacccccacctcaggctccatctttgtcccagcagcctcctctctggcctcgctgcccccacctgctcctgccctcttggggacctgggtgaccttactcaccctcatggcttcaatcaccttcatgcttaaaacactcacactgatttccagcctgcccagcttcccaagtcctgcctggacaccgccccatggacaccnccacagggatctgacacacaacttaggttgtcagccagagaagatccatctgttggaagccagaggactagtgggaaacacttaagtgttctcaatatgagattagctgagcccgcctaatgtcccaagagtaagaaggaaaaacagctggaaattggatagtaattctgaatgtcacctgaagggtcacagaagctactcacagggctggaagttaccagcactccagaaagtggtgggagggtaaatgtgctcatggtatccctaccgcaggcaatctgcggacagcactcgggctgctgagcctaaccacctcctgggcttctttccagccaccccacaggcaccttgcgcttaccaagcgcccaacaggactgactacccacttctctcctgggcatcgctgcttggcagtgggggcctgggaaggtggcagagcccagcctggcccctggagtacctgcctcagtgtctctcctcatcacctcctggccctgttgcccgccctcactactacctgcgggtccccttagtctccacaccagcctcctcaatgcccactcagggtgtccccttggaaccatccatcccgttagcccacagaggggcctcaggcccatgctgctcctgcctaacattgttctgtagcagcgtttccgaaagcgtgctcctgtcctgggagatgtcaaaggagttgaagaagcactgcccgccaccgtctcctctcagaaatttgcagtgtgtattatcagcacagcaaaggccccatcgcttcctaggcttattggactctggaggccactcaggtccacaaagcctgagcccctcagcctgacagtcccagtccctgtgctcacagttgggcccctggccctgcagacctggccagactcatctctcctcacttccaaactttctgtcacaacttgcccatgttactggctgccacctctccctgccaggcaaactcacctgactgtgaagcccagggcactccacagcagcatctcctgactgcctggccaggccaagggtgacctgtgtgctacccccttgaccacagcaccagtcacctgtccacttgccctgcccacctgccctcagggcagcactgatttctgagccacctgtgtccaccagcccagcacagtggccggcgctcaggcctcaagatgcctttgggaagcaacagaggagtgaatggcgtgcccacccggtccaggctcacacccacctggctgacttcactgtctgtggaacgtcccctcttcttatcatcttcagagttttcctgaggtaggggaggcagaatagaaacctgtgtgacctctggggctctgatggagaaccgccaatctctgaatgccccggggacctgggcccaattgactgccattgcggccccagagctggtcaaatggctgtccttaatctgcctggagaaaccatctcaattcaggctctccagtcttcttgttttctgggagccagcactgacccaccagcctcttaaggatctgggaacctgctctccacagggaagccaacccttggatccctgcccaaggtggccagctacccagcctcctcaggcagcccaggcaccggcccctcccacttcccagatccaggacctaaactggcgcgggatgcaccctattgctctttatgtcctttagggacccagatataggaccttagcgtgtgctccaagagcctagaccctggatacctagatctgtgtttcctcaattacgctcccatagccactttggagtgacccagatttgtctcctcgagtcctgccctgctggaaacacaaggtactagtgtcccgtggggcctcaccgtggtacagttggctgggctgggcgggatgggagagctggaggtggttgaggtgggcgtgctgctggactggttgaagatctcatcctccatgtggctgtggctggggggggaggtggcgaccagcgcctgtgctgtgggggcagaagaagggcatgcttagctggctcacacagcccattctgggccctcacttcctgtgccacgatcagccccagggcctcacgaatgtcctcgaggtccaggtcatcgtagagaaactcgttctcctcgaagtcggggtcctgggatgagtcaacatagtactcaacgtcgt

SEQ ID NO: 1949 - DNA, 2971 bp, Homo sapiens
gggaaagtgacggcccaaacgccagggaggagccaggacctcgccctgagctagcgggaggtaacggcggggagtcctggggcggagaccgagcgctgggggcgtggtctccagcgggactgggcctctagcgggagtgggggcgggggcgggggcggggccagcctgggggcccagacgtggcgcagcgactcggaggttcgcctccagcttgcgcatcatctgcggccgggtcccgatgagcctcctgttgcctccgctggcgctgctgctgcttctcgcggcgcttgtggccccagccacagccgccactgcctaccggccggactggaaccgtctgagcggcctaacccgcgcccgggtagaggtgagtacgccggcctccagccccggcactatcgttccccaaccctgcggccccatgggagcaccgtccgtcccggccccaagaccacctcgaaccgcgagtctccctgctttccccctggcgccgggaccatccctcctgttccctagccccagatggccccagcatccaccgtggaagcctgagacaccgactttggggcctggaactccgaacccttccccagctccccctacccggtccgacagcggacacccagacacactgacgcagtctcctaactcttctcgtggcctatgactcccaatcctgtcccaacttcccatcccccatcacttcatgttttcctggaattcccccccgacccggttccagggctggaggctccagaaagtctcttttccttctcctggggggaaagaagactttctgggtgcctcctcccatatgcaggatccggggaagggggccaactcggaggggcaaccgagttgggaacttggttgccaacatttactctgcagcagcctcccatcctcccccaaccaggaaattcccgttcggagtccctgtcttgctatgtgactttgaccatcacagcccgcctctgagctttttgtcagctctgtctgacaaaagggtgtagaatggttgggtgccggtggtgcacgcctgtaatcccagcactttgggaggccaaggcaggaggattgcttgagcccaggagttcaagaccagcttgggggacatagtgagaccctgtctctaagaaaagggctgagggtaggatggaggagggctggagtgggtggtcctggggtctagactcctgctggatggtggcatctcctcagggaaggcagggaggagccctcccatcctcccatgtcagggaagcaaccacatggtctgtggggctgggccgcaggtggcaggcagggtgaggtctgcctgtgtagagtagggaccagatggtaggtgtctccaatgggggcccccagggccattctgaggtgtttccttctgctctgcctccactgtgagatttcagggatcaaaggccaagcccaggtctctactgcttaagaggagcagggtgatcatttcccctgggcattgggagtcagtccacagccagtaggatgtacaggccccaaggctggcaggcacactgtgggtctctggccttgctcttttcccctggtgtctctaggcctgagtctccccacctgtatacacagttcccccttctgcccacaagggtccagcatttccttcagaccttgggaactgctgatccggggataactcacagcccgacccaactcagggataaggaagtatggctttggggatgtgactggaataaacgtgaaggactcctgacctatcccattttatccccctccagacctgcgggggatgacagctgaaccgcctaaaggaggtgagtttgaaggaagaggtccctagctctgttccccctgagcctcttggggagtgggcaacatggtcccaatgactggggcggggaggggggaaggatccctaggctgagagtctagcctaggctgagagtctagcctgcacctgacttgctttatgacctcactgggcttcagtgtctcgtctgtacctcgagtagactgaggtcatggtctctgatgctctggttcctccccaggtgaaggctttcgtcacgcaggacattccattctagtatccttctgttctgggggaggggaaatgggatgggcacctgggagaatctccacgtaacttcagaaaggggtggcagatggttttcaactgacaagttgaattgattggtagtggctcccagaggattctgaggtggtctccatgttgggtgggcaagagagattgactagtgatgactgccacagaatggagaggagggccctttacttctttgaaccctaattttctcacgtataagcggagaccctggcccctcccgggcacagagtaagctctgagcaaaggaggcaatgctgttcccatcagtaaggctgcggaaaccaccacctccctctgcccaccaccccgctccttaacaccacctccagtcacaacctggtgatgaaacacctccctggggccgaccctgagctcgtgctgctgggccgccgctacgaggaactagaggtgaggccgtgggaggtgggctgggggcgaggccagaggcgaggcccagcctgctgaccccgcccctcctccgcctcagcgcatcccactcagtgaaatgacccgcgaagagatcaatgcgctagtgcaggagctcggcttctaccgcaaggcggcgcccgacgcgcaggtgccccccgagtacgtgtgggcgcccgcgaagcccccagaggaaacttcggaccacgctgacctgtaggtccgggggcgcggcggagctgggacctacctgcctgagtcctggagacagaatgaagcgctcagcatcccgggaatacttctcttgctgagagccgatgcccgtccccgggccagcagggatggggttggggaggttctcccaaccccactttcttccttccccagctccactaaattccctcctgccttaactga

SEQ ID NO: 1950 - DNA, 23307 bp, Homo sapiens
tcgttgaaaaccaataatttatcaaaacgctgcgtgtgtatgtgggggggagggtgtcgcaacagacagggcagcggtgggcggacgcacaggcaggagacggtgcccggagagtgggggcggcagcttgccactggctggccatgcgggcgggcaggctagacattcttgccgcgcaggcgcagttcgtggcgtcgcaggtggttgtagagcgactgcacataggtgaagacacacttggggtcaggcttcttgcccatgatcatcatgtcgtccacctccaccaggggcacacagtccaccagcatcctgcagggagggggcacggggttggatgtcagcgccagacccgcctctcgtggcgcccctctaccccaaggtcttttttattgccgcattgcctgctggtctttcataaactccagacagggaaaagccttccaggaaggcaggaagcccctggcttcatctacccaagcctggaggcatctctcggggcgggggagcagagctaggcaggtggaggcggagatggcagaagagagccccatcccagtcaggcaggtcctgggtctgcttcctccaaccctggggaggtgctggctccaaaccctgcccatgttctccctggagaccaccttctgctcaccctcactggcacactccagttggtagaagcctctcagctcggcctttgcacccagatgggcttcatcactggccaatctttatctatggataggtctcactctagtggccctgtggtccaccgatgattgtctgctagctgcctgatctggtacttcctgttgagaggcccagggacccctattctttgacagggggtggggataaccctgctgctggagatggaggccagggaacgtgtgggcagcagaggggttctctaacccttatcacctgccttgggtagagcagaggaggcagatgaggatcccagccaataccaatggaccatctatgccatgctcggggggaccacccttctggccatccttcagaatgctagctgcccttcacagataaggaaactgagtcacagagcagaggagccatttgtttcaagccccatggcttagtaagtgcaggctaggccgcatgggacccaggcccccagttctgggtgttggcaaagccttttccccactctggagtgagtgggttgtgcctattaagcaactgacagctcccagagctctgaagctggagtctgctctctggctccttttcccctgtccctcaacccccagagcaagacctcttctgccttgatccctcctatctgccatacctgggacatagcaagcattcaatgttgctgaatgagtttcctatggcagggaaggcataatggcaacaattgctccttattctcaagacacctgagaacccaagaccacctcccatctcgtgcccttatggacaaactcagaactgtggtagggctgggcctacccccagctcacctggactccttcagagaagaaacctgggaggcagaacaccgaacacctctgttttagtccagactgtatccctaaccagttgtgggtgctagataaggcccttttctatgactgtttccccctctttagaacaggacagttattctctatctcatttgagaccttacaagaatttaggatgagtgagagggttctgggtctgctgctgatgtgccacgtgcccctagggtcatccctatcccagactgggcttgtttcccgagctgtaccatgatgcaaaggcagcctctctctgaagcttcttccagctgtggctatcgtcctggggatcccgaccgccctctccaacctggtgctccctcccgccccactcccttccctggagaccttataaagccattgtttacactggggctcagggctcagggctcaggctgccccagtgacaggccaaacaccaggcaacttgagcaacagcacggctgagtcacactttccaactggatcagggctgggctgggcccctctccctccaagctggcttgctgggcagcagctcctaagtccatatatgatctggagatagcaccaagcccatccgccactcatctgtgctccttctctgagtgtgtgtgtgcacatgtggactgccccccacaatggctccaggccctgaggggcatctgagtgtgcccctacctgtcactgactcacattccttcagccaatccccttgctccttctgggcctctattttcaatcctctctacaaaatgggcgggaacacagtgatggggcaaggaaaacagccactaagtggggagtttggagtctcagtttctggccccagctctgacctaaccatcttccctctccctcccacccccaggacagtcttagcccacgtctctctctgagctccttgtctgtaatggggtagttagtttaggatctgaattctttactttggtactgaggtgaggtgaccagagaggaaatgccacagctggcttaggatccagagtccccagccagaaacatcttcctgttgaactggtcctgctcctgagctccccactttggagtatggcaccaccaactccccagtgcccacacaggagcctggcagacttcttgaccttccctctccctctccaaaccagatctattgggaagcctgtctctctagctcttaagctattccagtcatctagtccatcccatctctcatccaagcctcatccgaggaaggtcctagaatgctatatccatcccttctctgtttggaaaccctttataactcctgttgtcctcaggaggaaggtcaaacttttttttttttttttttttttttgagatggagtctcgctctgtcacccaggctggagtgcagtggcatgatttcagctcattgcaaccttcgcctcctgggttcaagtgattctcctacctcagcctcctgagtcgctaggattacaggtgtgcgccacacgcctggctaatttttgtatttttagtagagatggggtttcaccatgttggtcaggctggtctcgaactcatgacctcgtgatctgcccaccttggcctcccaaagtgctgggattacaggcatgagccaccgtgctcggccagaaggtcaaacttctaactgtggccccctcctccctcatatccagactcaagtttcttcccttcctgatgtgctgtgctctccagctctcttgccctgctaagcctaggctgattcctctgcctggaactccctctccctcctttagcctgaacttgttcagatcccagcttagtttgcacttttttcagatggggggcccagacctgcagcctgggtcaggcatctcccctgggcttcccccatcacagtgctgcccacctgggtcatcactgcccatttagaatggtctcacctgctgggccctgaactgccagaagacagggctatgtctggctcctctggcttgactaaatgccccccttacttcccccacccgcctccctggaccctctctggccttgctgagcagattctggtgaaacggggcaggtggtagaggcggcgtttctcaccgtggggccccgagcaggggttaggactttttggtttttaccagccccttctggaccagacagcggtagaattcctggatgtacgtgtacacgcacttccagtcaggctctcgaagccgcaccatgtcctctgtatccaggagctgcgggcagtccgcatgggtcctggggagggtagggggccgggaaggggtgggggacgggggcaggaggccagggccccgggtggggaagagagggaagaggcagagaagagagaggggaggaaacagagacacacacacatacacacacacacacagagacatgagttcaattacgattccagtgctgcagtctgccagccccccgcatgcctcctccccactgtggacgtgccgctcactacccatcactaatggtgtgcaatgcagacaagggtgggggccaaaccagtcacaggtgcagagaactctaggggcaagcgggaacgcggggtgggggcgatggcgttggcaccaaggttggagaggagggctgtgccccggggagagggggtgagggaggcgtgagaggaggtggggggaggaggaagaggagaaggaggaggaggaagaaatttgagggaaaccagaaagagaaggggaaagaagggaagacagatggagaagggtgctgagggtgaggtgagcagacggggcaacgattccaaagtggagggcttgctgaggtcctatataagcctctggcagcactatataggctgggcgggcacggtgcccgggccaggagcctccttttggaatctccagccgggatcccgtgggagcaggaagctctggtgatagtgggaggagagcaggacagagaaagggagagagagggagaagggggcagagggaggatggaggggatatggacagggccacctggtgggctttggcccgggctggtaggccggcctgcggctccttcgttccggcgggcacctggcacgctcagcagcgggggggtggggatggagaaggacggggactctctggggaagggggtctcagccgctgactgacaatgtggctggcccgctccaggggttctcagggcaactgggcctggtcccgatgtccagccccagatgtgcagcaacattagcagggccagggcccacacttactccgcagatgagaaggccacctcgaagttctggcgtcggttctgagggctaagctgcccatagtcgaaggcctcagggaagaagttgtgcaccagggcacagaaggccatcccatcactccagctggaggagaagttctggatgtcgacgtgctataagccgtaggaggactggtcaggaacctgggggcaactcccccctgctgtctacccctcagcattctgttattccagacctagggcactgggcacaaagaggccccgtagcttgcacaatgagtgaatagttggaacatgagcctcctccaagtcagcctgtcaactcccatatttgcaatttcaagggacagagctactgagaggcccagcgccacccagctaaggctatggtcatgcctcatcactccttccctcatttagagaaattgactcagggcctcctacagagcaacaaggaggggactccaagagtgggatccggccttgaaccctgcccaccacccaagaggccctgttacttcatcactgattctggaatctagggcttgccttgtgtcctctttgagcctcagtttcctcaccccaagagcctttccatgttccctgtgaggccacacagtggcaggaagtgtactgggtaataggagctctgctaagaaggaggtgttgagctggggtctggggaggcctccaggccccctggcctcccggggctcacctcgtagccgcgagtcttggctcgacaccagtccagcagcatctgcttgatgctgttggcgttggggaccccgaagctggtggatcgctgcacggctgcgcggggtccgccagggctgctgtaggggcggtgtcaggaccaggtcacacgactataaggggcatgcctcggtgggcccacccagtggatcccaggccccgccttccatgaccttcgggcctttgcaccacagatctagccgcgcggtcttcccgcctctgccgggccaactatcaagccccgccccccactgcctatcacgccccgccccccactgcccagcccacttctgcagctcacccggccgcgccctccttctccagcttctcaatcatggccttgcgcgcctgggaggctgaggtcttgggcagactctgcgccttcatcagctctttcttcttctcggcctgccgtttctcgagcgccgccaggctgccggcccgtgggctggcctggtcctcgcggtcgaagatgctaggggttggggaggcgcatgttaggcagggagagcagggctgctccccagcctggaccaccactcgcgaggaggagggggggtcttgtagcacactagtatctccactgccacaaacgcctgccagggagggaggcgtcctcatcacacgcattttagaggagtacactgagtctcaaatgacagcaaggttttcaacaggtttccgcctccccctcccccacccacgagtagttctctgagaagcctcattgtaccctcaagttacaggggagttcagcttctgggcactatccgataataaaaatgatgactagcataataatagtaataataataattcatctctgttgatcctttcctgtgtgccattttaaacttcacaagagcagggaggggccttaccaattccactaaaggtgaggaaactgagacctctggcagtaacttgcctaagatttcagaggacgtgatgggcggaactagaacttgaacaaggtctctctgattcagagtctctggacccctttggttctcatcctggattctgatcctgttcctgctttctgccagccccaacagcctctgttacatgggggtaccctcctttctcatggggctaaggtataaaggtgctgtgtgacctgggacatggtttgcagatactgggaagtggcagtgccaccaggcagctcagtgtggtaggtaggcctctgtaagtgttcaatgctattgcagccactcagagatgtgagcccctaagcaactcactggcctccctgagcatccacctctcctgtggtgtggttgagaataaaatgagatcccaaggagagcaggatccttaactctcactttgcccctccctggctatagacctattacctcccagcatcccagtctacccctctgttttatttatttatttatttatttatttatttatttatctatttatttttgagactgagtctcgctctgttgcccagactggagtgcagtggagtgatctcagctcactgcaacctccgcctcccaggttcaagtgattcttgtgcctcggcctccccagtagttgggattacaggtgcctgccaccacgcccggctaatttttgtatttttagtagagatgaggttttaccatgttggccaggctggtcttgaactcctgacctcaagtgatccgcccacctcggcctcccaaagtgctgggattacaggcaagagccactgtgcccagcccacccctctgtaaaacgggtttgcagttaggtcccctgtggcactgactcctctatggtcagggattgggtgctggtgctcacctgcccatcttcttggatgaggaggaagaggagaaggtcttggtttgcatcatggtgctgccactgccatctgcaaaaaaggggaaggggcaccaggtgagggcctgggctggacatcaggagatgggatgggaggctgtatggaggggtggtgatagccgcaggcagagaagagaaagtgacggcacagttgaagacacggagagagagctcaaggaagagccggaggaggtgggcggacaggcaggcaggcacagggcgacaccaggtggccttactctccgagcgcctcacgaaactcgactccactgtggtggtgcgggccgtccgtgtgccatcatctgcaggggcaggggatgagaaggatgtgaaaggcacagggggctgggggaggatgtgttcccaccctgagccctgggccggccccatttggccccttactggagtggacgagccgctcagtcttggtaacagtgctgacagcagagccatcagctgcccgctggctgtgcctcgtggtggtctcagtggctgtgttgccgcgcccctcccctggccggccccgtgcctcctgcagccgccgttcccgctccttgtcccgctggtctgggcaggggatgccccatgcatgcgcaaaagggccaccaacacccacacagcacagatgcacaggtgcatggggcacacaagacggggtggagggtggcttgttagaaacatgaatgacacaggtaacaagggcctctctaggagcagctggggtgaggggacagccataacttgacagggaatggagtgtgggaagggtttgatggactcaggcagaaactagagaatacggagtagctaaactcaaaggggtatggatccaaaaagggtttctataggcatgagtagctaagtcaggaggggtatctagatctagtgagggggtagctgagtccaaggaaggagaagctgagtgaggaagtagctgggtgggccatcagcaggtctttggttggaggagaagagcagctggaggcaggaatatttagatccaggaagggagcaattgatgggatctgagaagcaatctgatccaggggaagagtagctgggagagaagctagtgaagggggttaactgggcttaaaatagaagtaggtgggtagagatagagactggggtggccatcagtgggccctggcagaagcagctagattcagaggagtaattgagagtgtttgagaggagaagcaattgaacccagaatctaagggaatgaatagatgtgtccagggaagaactatctgggggaggaagtagttgtgtccaggaaaagggaagctggatggggcagaggctaagatggccatcaatggacttcagggagagaggagcagcagggagaaggagtatctggattcagggaaggagtcgttgacagtactttgagaggcaactggatccaaggagagagtagctgcgggagggagtatctgggtctaggaaggagaagagaagctggttggggagaataactggggtcaccagcgggagagaaggagctagggaaggagcagctggatccagcagggaatagccaagggaactgctgggtctagagaaggagaagctgggtagggcagttattaagctggggtgtccacaaatggaccccagagtatgaggggagcagctggggaatggggcagctggatctagggtagggcaactggctctctacctctcttcctttgtcggagctcacgaagtgcagcccggatgagcttccgctcttcaaagtccgtgctctgatccagctgcatatagagcccatcattgcctacctggtgcctgctggcctctgccaacccccagcccaccggatctggctataccatcttgtccaagactccttcatcctcaatagtcatcagctcctcagcgctcagagggctccgcccttctggtgctttgttcactcgggtctgctcagccccattggccgcttccactgctgcagcgagaggctctgctggctctgcttccatctgcagggtggggagagggcatggactttaagcaggggtatgggtgaaactcatcatgtctccaatggatagggaagcagatcctagggttgctggcacgccttggaaataaccactagcctgccagcctgcctgcccaaagatggccatgtcagcgtcagtcagggaagaggcactgacagttttgttgtagggcttcccacgtaccccgaattgtattaatacaatggatagtgataataatgatgatttccagtccatagtaagtgttgtataaacactagggactttactgtccctatttaacagaagggaaggccgggcgcagtggctcatgcctgtaatgtcaacagtttgggaggccgaggtgggagggatcacttgttgccagcagtttgagaccaacctgggtaacatagcgagaccgcatctctacaaaaacaaaaataaaaaattagctaggcatggtggtgtgcacctgtagtcccacctactcagaaagctgaggtaggaggattacttgagcccaggagttagaggctgcagagagctatgatcatgcagctgcactccagtctgggcaagagagtaagaccctgttgcaaagaaaacaagaccggaaaaaaaaaaaaaaaaaacagaaggggaaactgaggctcagggcagctaactgacttgcccacagtctctctctaagtgtgatgcagcctgggatctgagctgaaggcagcctaactcctgaaccttagttcattttgctgctttgttcccagccccctcccaggcaggctctgctctgtgctgccagttcccgaggcctaggtcctcctgggccagtgcccaggcagcacatgttgccccccatctgcctgctaccttgccaagagggctggcccggggcctgtaggctcctgaccaggtgtctgactggggctgccctgagccaagacctctatgaagctctcctctgtaccacctccccctgcctcgcccctgctggaaaccatcctctaaggagtctctagccctgcagccctcccagggcatctccctagccccttgaagacaaggccccaagccaactattatggcccttcctctcctggcagggcctctccgtctgctataagggtaaggagagctgaggtggcagctgtttcagggaggcttggtctggccagggtgcagggcggcagggagctgggggctggggcctgggtcatgccaggggctgccaaggcagctgccacacatgcctcagggctggagcctggcaccctcttgccctagtcttagagcactagtgccccagtcccctgtcaagatagataaactgaggctcagagaaggtggtgacatacctaaagtcaagaggaggcagagcctggctcaaaactacccctcccaccaacccagaagcacttacgagactagtgctgcgggtggtgccggtggaggagcggcggcgggtgctgaaggcaggtgggtgggccacgggggtcccggcatcctcggcagcctgaaagagggcctcggggtcggcggcagccaggagcagctcgctgggctccagctcaggctcaaggccggacacaagtgggacccccagccgtaggctcagcacctccacctgcctgctcagtgcatccagccgccggctcagtgctgctctctctgcccgcagctcttcagctgcccgggccaccggctccacggtggctacagctacctcggctgcctgggtcactgccacccggcctgcttcagccaccgcccgcagctcctccagtgcccggcccaactgctcctcaagggctgcggccagctcaggcccaggccctggtacccccggcatggtgctggtggggactctatggggggtaatggtggggcagtggcaggggctgctgtctctggctgagtgtctgagtctttgcagctggtccgagggcaaaggcaagggcagcgggcctgccccgcccctgcctcccagcccgccaccagccagctggagctgcagcccaaatagaaacctattctgggctcctccgtggaaggggcagtgggggagggggggcctgcccaagcaggcggatcgccaggcctggctatagccctacagaaatcataggcctgcagcacagtaagactgcatgggttctgaagatcactgagatcggggccccatgcctcacaggtggggaaactgaggcagggaacagggaatggacctggcctagccaccatgtacattagctgtgagaatcagtctgctggactccacagcctgtactcctttaccctttaccctaactccagctgttttagacagctggaacagatgggggaaatggaggcacagggaggcaggactttgagtgatctgctataaaaagtgtcttggtcttacataaatgccctctggcctgcccatggtgctcacgtccaaccacagactttgagcaagcacattatgggtacatcacctgtcccctttggttccagatgggtaaactgaggcaagttggtggtgtcagacccaggtctcactgtggcacctcccatccacctcaagggcctcagcgggtccccccaccccaccccacacaatcccttgtcagagggcagctggatcctgcttttttggaaaggaagggtgctttatttccctcactctctccctgtctcccctgagaaggcccaaagctggtctagccatctcacctcagccaaagtcccattcagtccctggtttagcacagagggcattacctgggcagccgggtggcccgcttggggatccctttcccggctgagctcccggctagtggatcctgggcttgggaatgaataatggaagggtgctgcgtattcagttcccaaggcacctgctaggctgctgcctcacctgattggcgcccctctgcctgtctgtcccccctcagagcttctgcccaacccccacagggaggttgacgcagatgctaatcactaatctccaatctcctaatgggccaggctgatcttggatgagcagatgagctgctctatacctcggggctgatgtccagtgtgggtgggcgcaggggcactggggctgccacaggaagaggggagcaagcccttaccaccctctctgagcctcagtttccccatctgttcaccaggaatgaaccaaccaatttcgaactaaggatcagagatcagcatccaggaagcttaacgccagtacagagtaagcttccgacacacttagggactgatatgctagggtctggccttagctctgccaccgactggctgtggtctgtgagcagccaccttccctctctgggcctcggtttctctgtgtgtgcagtaggggaggagcagaggaaccctgctagccctacaccctgaagcagtgtatgtgaggctgacggatggtgaggctggtggggtgaggaggggctcaccttgatgctgcagcctcctcggctactggggggggcatggctgaagctggtgacatgagtgacactgcccagccgagccagggtcccagggctgttgacacgggtgatggtgctcttgcccccactactggtgctgagtagggtcgggggcgcccgcagccccagtgtcagttctgagtggggagaaaggtggctgtcaggaggatcaggtggagtgagggcagtgccagacaaggttgataatgccctcgctcccagcacaccctttggagacaccctgagtcctggccgcagcacctgtcctgcatgcagaagtgcggttgcaggcactcatccccattggggaggcagtggggggcgcctacctgccctctggttgcctgtgggcagcagcacccggcctgtggaggcctggccacggccgtccttgatctcgatggtgaatgtggtcttcatactgccccctggctcggcagtgccgacggccacgggcagcggggcaccaggctcctctgaacgtgccacaggcccccctgctctgttttcaaggggcctagcagccaagccccgccccctggggccctcctcctgggggcagcttcgaagctgggccaggggctgggctactcctcgttgctccttgctgaaccgggaggaggtatcactggggccccgagaggaggagccgctggaggaggaggcaggggtggtgctggtgagggaggggcccaggagccttgcgggggtcaggggacttagggcagcctggggtgtgccatcctggagcctagcagccataggagaatcagatgtgaacttgtggacacgatcccgcacagagccagcccgctggaatgaggaaggtccgctggcaaggggggtggactctagaaggaacaggagggctgtcagcaactgggtgggacagggtctgcacagatcctaggcagggtgagaataggtagtacctcggttctgggctggttggcgggggctgagcaccgacagggagcgttggcagggtcggggtccagccacgtctggcaggttggggagggggtgatggccatgtggggaaagagaaaagacaggggatagtgggtgtccacctttcataatcctctcctctacacctccctagcttcccaccctttcctgtactcaacccccaccccacctctccatcccctcctggatctcccacactccggcatccccactcggctgcatctctcctacaggcacctccttctcctgccacactgaccctaggatgacttggacactcctgggggccaggcgaggcttaggctggaggaagggtgcccagatcctttctgcagatggggaggggggacagccctcctggccagtgctgcccacagctccagctgggagatgggtggactcccttattggggagaagaatgtgcctgaggcccgttgcctttcaaggctgcaggggaggcctctagccatgggggtggagggggaggctggcctagctgggggcggggacacttcaggggtggggtgcagtatcagggactgcatggacctgaggaagctagagctgccaggcacaagagcccattttctaggcagggaaagggaggcagggggaggggaagaaagatgcctgtgactacccctgctgggaccctcacctgctctcttggtgtcagaggggcctctggtggggctctgggcagcaggggtctctttggggccagacagaagctgcaagggagaagaacagggcctgagcaaggcctgactcccagacctgctcacttgcctggcatccctgcccctcatccagactcaccttgttgaccacctggccctcagtgctggggagcgttggagactcctgaggctcagggctggtggtcttgggtgggctggggggtggctctgggctgcctggaacctcagctgtaaggcactgggcctcggcaggctccaatggaggctcaggagaggcaggggtgggtgaactgctgggtgaggcaggtgagctggatgtgctcccaggtggggctcgcagcaggagtgtcactgtggtcacatcctggctggtgccttcaggggtgggggttggctttgaaacctctgcctgctgttcctgttcctctcgctctggcacctgtaagggacccacaggatgcaaccaaggctccctaggctttgaacgccacccccaccactgagggccaggctggcaagtgcccagggcagggcatgcaaagcagagtggtggggcatggcttcctgtaggcacacctgcgcaagcactggcactggcatgctaagggcagtctctgatccccacttcccaatctcttggcactacctagccaaaggggttcagagaggaccaggtcctgatgtcagtgggtgggtatggcaggagacctattggggacgggagccttaatagatccctggagtggaggttcctgactcctggcctcagcctggttcatctggagtgggagtggggtcctgccaggaccgtggacccagcggcctctgctggccacttggggaacctgcatggcctgacctctcacccacactctggaaaatagagtgaactgtgagccagctggggtctgacatgcaggccccataagccaaggtaaagatgtgggctgtgtggagggtgaggggcagccctgggacgggttgaagcaggggaggtgccagggccggatttgcatttctgggagatccctctgactgctaaatagaggctggatggcaggggtgggccccttacagtgaaataccagcctagcaaagacactcaggcactctgtgctaccggtatccatgggcacaggacactgggccactctcccaccctccttacctcacactgttccagcctgtgtgccgctagccccttgctgtcctctcttgagccactgttgggacgcccgctgtacaacctcccagccaaggtggcagctggaagggaaggagcaagtggcaggtgagtgacagggaggtgctgtggacagcagacagcagggcaggggtggggccgggacaggccacataccctcaatctcctgagcccgtacacggcggatggcagctcggatcagcttgcgctcctcatactcaccagcgcttcgcaactgtgggtaagagacaggtcgcgggtgttgggctgtggagtccaggtcttcacctgccctgcccccatcccctgccccagcctgggcctcaccagtgcagtcaattcctccacatcgttcatggactccagctgccctgccagccgtgccagggcagcccgctgctcagcttcccgctgctgagagctgcagagacatcatgactgtaaccaccactgccatggccaggtcgtggaggatgtgggctaagggtaggagccagaacagagtacccagaaccttggcagaagggcatgtggctgtgcacaccctctaactgcacactgatacacatatgcccatggacgtgggcactaataccacacactcagacgtgctggctacatcagcacggccgcgacgccacaatcagtacatgctccatgcccacaaacatctctgtttttccagaagcgtgtgtggacgtactgccattagcacatgcaatccacagatacacttgtgctcacgcctgcctgcacacatgagctgagccagggctcacactcaccttctcacccgcatgttccaccccccgctactcactgcagccagttctccttgttgtcctgccgctcggcacggaaacgcttggatgccagggcctcctcctcgcgctccagctcctgccgctgcagttcccggatggctgagcggatgcgccgccgctctgccagatctgctgtgacctccagctgcagtgggtgcgagaggcaggtcattttggctgccaggggcggagggctggcaccagctgcccacggctctgcctagggcacaatgtgtggcctgtgtccactccctgtgtcccaagctcttcacgtgcctgcctgcccacgcagggtcccgggggtagacccagcccactgtttcagggatcttgggtagtccactttgcattgtggttcacagagcacacaactgtgagtggacagccagaaactgcccacttgtgccaggtgccaagccaggcactcctttctacaactcgattcctgcctctcagagcccagatccccaaaagtcagggagctattgtaggaggaggagggaggccaccctgtgggtcactaacagggtccctagagggaaaggtgacagatgaagtccaccctctgagcaagggaggctccctggtctagtcaccaaacaccacagcccagctgggggttgactgcttcatccacagatggggaaactgaggacaggtgctcaggagtcctgcctggctgagggctattgtccccactgcactggcctggacctagccaccatggaagaagccagggtgcagagtgggaggaccaatcccccagacatataaggtggctggcactaggggccaccccagggccttatagagggcatccctgggtgacagctgcttctaccggttctcaacccctcagttcccgggaaattgggggtgactggtctaaccaggttcaggaaagaacaccttctctggagtgagtcagccaatcctgttgcctcccccacacctccaccatgtagagccacctgctacatacagatcctccgtggctcaagggagagaggactggcccagggttcccctggaagatagtggcagagataagcctccagtgtgggtctgataaccagacgggagccagtaaaggcggggtgatttcctctgtccccaccccccaaatcattcaggggtagggccaaagaaccctctatcatctccctttttagcgcccccccgtcattcctttctgcttagcgggaaggccaggtggcaagggtggggatgggatggagatagttttcagcagggagtgtgggctggcccaactcagccatgagccagcttgtcctagtctgaagagagcagggagagtcttgggggaagagccctccaggctccacattcctgaggaattatgagaagaccccctgaaactcaggccagagcccttagttggttccagccctagtccaatcctggctgggtgatcaagagcatatcccttaaactctctgtgtcttggttttttcatttgccagtgggtggggttgggaacagtgacttggcctctcctgtacatagctgcagttgcaataagcatcacccccatacttggttctagccagtcaggaggagggagagagacaagggggcaaatgggaagggcaggataccccgaggcatcagtaacatttatggagagcctgtgagtcaaaccctgtgctgagccccctacttgtcctaagcccacaaaaaccctagatactactgttattcccatttgacagatgaggagattgaagtccagggaggacatgtgatttgctcatggtcaaatgacctgagccaggatttgaacccaggtctctctgactccagggcctgccctaggctgaagatagctctgctactggggtctgtgtgtcatggtggggacctcagggatcctggcactgtgttggagacccctctagcctggactagagatgctctgaggcctaaggaggccttatagcagaggcggggggaatgaggctcactccccagcccccggtgctggctgtgtctcaggcctagagccttctgtggtacatttggaggctgggggctggaggggacagagggtccagccccttctgtacagagggtaaagaggcccagaggggcaagggctagccttttgtctcctaggtccccattctcagtgctctgggctcggagatggggtccttgtctctgacaaaagcctgatgtaggaacttggccacctctacagcacaacccccggagcttcagtgtccccatctggaaaatgggagcctccctctgatcccccaaagtgggtgggcaaggctggagactgacaacctcattccactggtcaccctctggcacgacccttccctttgggcctggaggcaaaggttggaccacagtgtctcctctgtgtgtcccgagttccacccgcccaggccccaccgctgtgtaaggagggagctgtgggagggagggaaggaagtacaaagcgccattgtctaccgagggggaaggggaaggggatggggcggtttccgaaactgcccagtgaaattctcccgggaggaaagagggtgcttcctccccctggggagccggctctccgtgtactctctgccctcgctgttgggaacgcctggcaggccctgaggtctcactgggcctcagtctccccaacagcacaacggagggggctctccaggctttcagtcccagctcccccggttgcccatgggggtcccgccggcggtggagggaagcctcgccagggggcgctgaaggcccgcaggttctgcgaccgccctccctcgcagggcgccgccctcgcctcgcccaccctgcctcgcgctaggcgccgaaggggtagccaggtaggaagacacccgctaccgcctgcttcagtgtccggatctaaagggaagaaaccaaggtccccaggacacccagctgagtggcggaggtcgaactcgaactcgggaccgaggcagagggcgtcccggcgggtggtggaggggcacgcggcgtgcaagtccccaggcgtccccattcctcccatccccggcccaatcctcaagaatgtgcgggagccggggccggaagcgactgcccgcgtccccaaatcggccagacgctggggcgcagggcgggcggagcgggcctagcttttccttatatggcccggccccgcggggaggagcccggctcgggacgcccccgttcttgccacgaggccagcgggggccgggccggcgcgcggggcgcagtaatggcgggcgccgggtgctggaggagccgctcccggggtcggaaagacttcgagaggcaccgatcccgagaccggggcaggttctcatctgtcctttcccagagattcaaccactgctccagcttctctccaaaactcttttccagcgccgcccgagcctcgcttaagagagggaggtggcggctgaagaaccctgagcctgcctgtggataccttgagatgaggatgtgcgggaaccaggcctggcattccctctttttggactgtgctgcctctacgacccccactgggacttggacttcctgagggaaggtcgaactgactggcgggcacctttggaaacctaacctcatcccctccaggctgcacacatcctgcggtgatagtggagaggcagacacccagagagtctaatgcgctggtccgagaacatacaggcagagtgccttggggaggtcatggcagcagctgggcactgcccagtggctgggctacgctggttggttccagcctctgcctgcgggggaaggtatgagagtggggtgggtcacttgtcttctaggtaaagtaaatctttaatttacccccatggacaagggtcagggactgaggagatggagctcctctggcccctcctccaggtcaggctgcctggcctttggggttggggaaggagccctgccccactgggttgccctacggcctctgtgcatggaggtagacagggctctcaggaagaggaacaagaaaggggatggagtgggctcatctttcctccacctgagatctgggtccatgcctcattctgtccccatgccaactctaggacctagagcttgtgtgcaaacacatctccctccctcccttcattttacaggtagaggaactgagactcaagagtagaaaaatgagatgagaagccacagaatccataagggcccacaaaacctgtctctctcttatggcctcgtccagccttgactttcccaggactctggtcccccgtggcccactatggggttgggattttggcacagctccttcttagatgggtgtccttgagcaggtgattttaactctcttgagtcgcagtgcccaggctttcagagctgctgtgattattctgtgacatggtatacccagtacccagcctgccccctgccaggccttggcattattaatcattgctgctaccattatcactgggccagcttccaggggtgggcattgcccgagctattgctctggagaggcatatccagcctccccacacctgtggctgcatacgggcgagtctacagcagttactgtttaaacaggtggtggctgtggagggttgggagggactaggcttcagtaccaggcatggacaggcacatgccacaagggcctctgcatcagccacatggaactggcctacccctgttcccatgtccccctcctcctgacctttcccccatcacttcttcctgtcagctgagaggtaccctggattgaccctgcctctctggcttggctttcctgtccccacagtgggtgatggggccacttaccagcttccgaagggctccctcatccagcccagctaaggcctcgtccgccatctcgctggcccctagctccgtcggttcctttctggtgagatccccagtgcctgtggcacctgtcaccagctcagagaattctgcaggggacagacatgaatcaggcatgctggggcttccagaaaccacaggcacttaggctctgtgccttactttccctctctaacctaggagcgtccattactgtcccatcctataatgtggctcctggctggaagctgccctctgccctagggtggtttgctggaaaactcaccaaacccagggtagggggtctctggttccagccctgccagcttggccgccagtctgctgtgtggcctgggatggactctcatcctgtctaaacctcaaaacagggagggcagggacctggattgagaagccagggcctggcaagacccacccaagctgtgcttaccaccagggggtgcactccagtctccagtttcctgccccacccacccatccacagggcctacccagcccccacccactccgcaggctcagcttctggctgtgggctgaacccgtagttcttgctgccaccaccactgtcattcccccaggtataggaaggtacactgtgtcttccgattcttggagccagctctgctgtccagacctcctgaagccaggtgtccaggcacccagcacctcctgccaattcatacagaattcaattccccacctggaagggctttcagaagctgacctgcccaacccctggatttcaggcaaactgagaagattggagagggccaaggatttgtcactgagcaaggaggaagccaaagacttagagggcagagaaggatgtaatcaaaatcttcgtcatctccggcttccgaagctcccttccaaagtgccctcaagggcctggaacactctcagtgacagaggcaagagccccatcttgccccagtgctgcccatcaaaatggacccctaaatcctggcccagcctcccagcgcagatctctccttcctcctgtagccccaactaatgtctgtctggaatttgaggggccctggtctggcacactgtggatgcttagttaatgtatggtgactgactaatgtgtggccccaggcctgccccccacctcctgttgattcatctttcaatcatcccttccctctcttcagaacagtcacttgggaagtcaccccatacggtgcatgggtggggggtgagggttaccgctccacacagttggggtgtgtgggtcccagcctgttcaagtcactgcttgttccccctcccatcctggtaggctcagaggtgtcaacctcccaatctctgcctgttaggatccttgcctcttacctagttactctgtctgggttaaacctcttcaagactgtccagtggtcaccagccttaggttctgcggacattctgattccccccatgtctgttcttctatggggcagctgaccctaatgcctaatctaggacacccatgggattataagaagatccctgccgctgctcttctccaatctccctgtcacacagtctggggtcgccggacattgtgaggggcctcaggattctgtggcagcttccccagggtttctgccgccacagactagcgcccctgtggggcgtggagtctcttaggaatccgggggcgtcttcccccaacagtctcataactttatcccatggcttagacctctcgtatgggtgggggctcccaggtctggacgttccagaactcctgtctagacatccgggttccacccccggacacgttggggcagcaccaggatcccccccgaggtccgcacacccacctctcagtccagcccacccgtccggcgcaggctcggcttagctctttcgggacccgacagacggattagacacgcgcaggccggaggtgccgcgacccgctgtcccaggcccgctcagcaaccgtcccctggattctgc

SEQ ID NO: 1951 - DNA, 1122 bp, Homo sapiens
ccagggcccagcatcagaagccggccgttttgatagacgtgttccctctgcgtccttgcagccttccatctgtgctacctcccaggaagccgaaggccgcagagtccctttcggatggcactgggagcaggaaaatgaggtgattatgggctgctgctccaagaagtattggcagctgttgctggggcggctccctggggtgtcatccctttcttgctcttgtggatgggaaccagagcaccccacttcaaagactctgtaagccagggcttaccagagaaagctgaagagtctagggccaattttaatcagtttcttgtgcttctcatgccaaaagagatgattgtcctcactatagttcatcctatagtgcggcgggcctgactcgctactgccctctaatgttctgggagagaagctgttgggtctttcctacctaatctggtagaaatgttagaacagaggctaatttggggaaataaatctctcaatttttttgagttgctttgtgtgtgtgcgcgcgcgcatgtgtgtgtgtaaggggcagggtctctaagaaagaaagaaaaggaggcgagaggaggaaagaacctgtttcagtttcccaggctctggcaaggtgactgaggaagcgccaagccccttagcctctttgggctctggttacctcatcagtaacattagaaggttttatacatgatttatccttttttattcagctcttatagtctataaatctccagtaagttgtggaaataaactgtcttttaaaaatctttaaaaaaccattttccggccgggcgcggtggctcacgcctataatcccagcactttgggaggccgaggcgggtggatcacgaggtcaggagatcgagaccatcccggctaaaacggtgaaaccccgtctctactaaaaatacaaaacattagccgggcgtagtggcgggcgcctgtagtcccagctacttgggaggctgaggcaggagaatggcgtgaacccgggaggcggagcttgcagtgagccgagatcccgccactgcactccagcctgggcgacagagcgagactccgtctcaaaaaaaaaacaaaacaaacaaacaaacaaaaaaaacaaaaaaaaaa

SEQ ID NO: 1952 - DNA, 1120 bp, Homo sapiens
ccagggcccagcatcagaagccggccgttttgatagacgtgttccctctgcgtccttgcagccttccatctgtgctacctcccaggaagccgaaggccgcagagtccctttcggatggcactgggagcaggaaaatgaggtgattatgggctgctgctccaagaagtattggcagctgttgctggggcggctccctggggtgtcatccctttcttgctcttgtggatgggaaccagagcaccccacttcaaagactctgtaagccagggcttaccagagaaagctgaagagtctagggccaattttaatcagtttcttgtgcttctcatgccaaaagagatgattgtcctcactatagttcatcctatagtgcggcgggcctgactcgctactgccctctaatgttctgggagagaagctgttgggtctttcctacctaatctggtagaaatgttagaacagaggctaatttggggaaataaatctctcaatttttttgagttgctttgtgtgtgtgcgcgcgcgcatgtgtgtgtgtaaggggcagggtctctaagaaagaaagaaaaggaggcgagaggaggaaagaacctgtttcagtttcacaggctctggcaaggtgactgaggaagcgccaagccccttagcctctttgggctctggttacctcatcagtaacattagaaggttttatacatgatttatccttttttattcagctcttatagtctataaatctccagtaagttgtggaaataaactgtcttttaaaaatctttaaaaaaccattttccggccgggcgcggtggctcacgcctgtaatcccagcactttgggaggccgaggcaggtggatcacgaggtcaggagatcgagaccatcccggctaaaacggtgaaaccccgtctctactaaaatacaaaacattagccgggcgtagtggcgggcgcctgtagtcccagctacttgggaggctgaggcaggagaatggcgtgaacccgggaggcggagcttgcagtgagccgagatcccgccactgcactccagcctgggcgacagagcgagactccgtctcaaaaaaaaaacaaaacaaacaaacaaaaaaaaaaacaaaaaaaaaa

SEQ ID NO: 1953 - DNA, 2979 bp, Homo sapiens
tttcagaggaccttatcatgtccttcactgtatccatggcaatcgggctggtacttggaggatttatttgggctgtgttcatttgtctgtctcgaagaagaagagccagtgctcccatctcacagtggagttcaagcaggagatctaggtcttcttacacccacggcctcaacagaactggattttaccgccacagtggctgtgaacgtcgaagcaacctcagcctggccagtctcaccttccagcgacaagcttccctggaacaagcaaattcctttccaagaaaatcaagtttcagagcttctactttccatccctttctgcaatgtccaccacttcctgtggaaactgagagtcagctggtgactctcccttcttccaatatctctcccaccatcagcacttcccacagtctgagccgtcctgactactggtccagtaacagtcttcgagtgggcctttcaacaccgcccccacctgcctatgagtccatcatcaaggcattcccagattcctgagtagggtggcttttggtttttgtttctttcttgtcttgtcttttattgaaaggaaatcaaaaataggctaaacagaattttgagggcatggcccaaataactcatgagttccaagttgaaacatggttgtgcaagttggacattacaatgtaaaacacattttcttcaaacacgttttcccttttgtttcaaaaaatgtaatattttcccccaagcgttttatatttatgtattttgtattcaatgtgaggcttattaaaaatagtgattctaatgtaagaatcagctaagatgcattatatatattttaattaaaattaaaacttcagatatttgtggattacaatcctcatttacttccaatgtgactaaaaagagaaaaaaaatcactgtgtcactttaaagaaaaatcttctaagggatttggattttactttctttagaatgacaagtgaatcatattgacattttacaatcttagatttttctttttttttcttttgagacagggtcttgatccgtcgcccaggcgggagttgcagtagcatgatcaggactcactgcagcctctatctcccaggctcaagtaatcctcccatcttagtgccccaagtagctgggactacaggggtgcactaccacaccgggttgaatttttttttaattttagtagagatgaagtgtcactatgttaccaaggctggtctcaaactcctaaactcagatgatcctcctgcctcggcctcccaaagtgctggaattagcctggccaatcttggatttttaatggaatatgtgggcacaaaatgacagaacataggacattctaaagttccttgatttgatcattataagaagtgtgggactcaagcacaggaaactgaactcttttggtgtcattggatgtttcatttttgacactaattttttctggacaaactctttatgtgtttttcccaagaatagttatctacttcctggaggcaaaatccttggatttactaacatgatgatttaccttttcttcaccgttgtcgttacattgttagaaaagcaacaggaaaaaatccaattcatttgacctaaaaacaagcctcaagtttaaaaccaagctcacgtttttcttaagggaaaaattttctttcttaaacttacatctagcaacttggaaagcactttctctggggatcttcttttgtaactttgcagacaaataagtatgagtcactggggagagagtttgttattgaaatagatgttgcccatgaagaattctccttcctggattgactcttaatcatcaggcatcattcctggtttgcttctctacgaatctcaattccaacttctctgcagagtctgtacagtgattaagccatgccagatggtctttggtgcacacagttatttaagaatccacttccacaggtggctgcccttgtaaggaagaatgcatccctaaatgtggccaccagagagttccagtgggcagatgtctgtggctgcccttctcatttaaggacatgagttcactggagtattactcaaaaagtctgtggttcatttccagtattgtgaatatttagtttatgtggccgtttctttgtttctttgaacagtgggattttcagtgaaaaagtaccctctttttcatttcctattgcagtggtcacagctaatagtgtctgaacatggttcaagaataagagattccatgtagcattttctttattattttcatttcccttatattatccatcattccttaaggacaattattcttaataatgcttatagaaaatgttctctaattaaacatgccaaaaggaaaaagtaagagaaagagggagcaagaagaaaatggaagaaaaagggaaaaaagctaaccggataaccaatttgttataagttggttttcaacaaagaaatttagcagccaagtaaggtttcaagggaatattaacttggtatcagggctacttttttttttttttttttacttgcatgtcatccttaatgtctaacatgcattaacagcacagagtatggtttttatcaagaatttgtgttgggagtaaaaactgctttatagctcccaaattaggaagagaagagcagaaatcctctggggcatttaaccatctggcagaattgttgctgcacccttatcccagttataagacagtcaaaatgactatggcctaaatattgcgagtgtatgaaatgtgaaattaaagcaaaaactggagactttgaatgtatttatttaattagaaatgctaagcggatcgtgaaataaaaatacatttatgcgacgcggtatccaaaatccatttatgaaataatgccaacactgaacttaaaagcttggacctataacatctctaatcgacattcgctgtgtagggcacattggacgcgcgatggtgctatggaaccctttcttatttaaatgtatcgc

SEQ ID NO: 1954 - DNA, 2983 bp, Homo sapiens
tttcagaggaccttatcatgtccttcactgtatccatggcaatcgggctggtacttggaggatttatttgggctgtgttcatttgtctgtctcgaagaagaagagccagtgctcccatctcacagtggagttcaagcaggagatctaggtcttcttacacccacggcctcaacagaactggattttaccgccacagtggctgtgaacgtcgaagcaacctcagcctggccagtctcaccttccagcgacaagcttccctggaacaagcaaattcctttccaagaaaatcaagtttcagagcttctactttccatccctttctgcaatgtccaccacttcctgtggaaactgagagtcagctggtgactctcccttcttccaatatctctcccaccatcagcacttcccacagtctgagccgtcctgactactggtccagtaacagtcttcgagtgggcctttcaacaccgcccccacctgcctatgagtccatcatcaaggcattcccagattcctgagtagggtggcttttggtttttgtttctttcttgtcttgtcttttattgaaaggaaatcaaaaataggctaaacagaattttgagggcatggcccaaataactcatgagttccaagttgaaacatggttgtgcaagttggacattacaatgtaaaacacattttcttcaaacacgttttcccttttgtttcaaaaaatgtaatattttcccccaagcgttttatatttatgtattttgtattcaatgtgaggcttattaaaaatagtgattctaatgtaagaatcagctaagatgcattatatatattttaattaaaattaaaacttcagatatttgtggattacaatcctcatttacttccaatgtgactaaaaagagaaaaaaaatcactgtgtcactttaaagaaaaatcttctaagggatttggattttactttctttagaatgacaagtgaatcatattgacattttacaatcttagatttttctttttttttcttttgagacagggtcttgatccgtcgcccaggcgggagttgcagtagcatgatcaggactcactgcagcctctatctcccaggctcaagtaatcctcccatcttagtgccccaagtagctgggactacaggggtgcactaccacaccgggttgaatttttttttaattttagtagagatgaagtgtcactatgttaccaaggctggtctcaaactcctaaactcagatgatcctcctgcctcggcctcccaaagtgctggaattagcctggccaatcttggatttttaatggaatatgtgggcacaaaatgacagaacataggacattctaaagttccttgatttgatcattataagaagtgtgggactcaagcacaggaaactgaactcttttggtgtcattggatgtttcatttttgacactaattttttctggacaaactctttatgtgtttttcccaagaatagttatctacttcctggaggcaaaatccttggatttactaacatgatgatttaccttttcttcaccgttgtcgttacattgttagaaaagcaacaggaaaaaatccaattcatttgacctaaaaacaagcctcaagtttaaaaccaagctcacgtttttcttaagggaaaaattttctttcttaaacttacatctagcaacttggaaagcactttctctggggatcttcttttgtaactttgcagacaaataagtatgagtcactggggagagagtttgttattgaaatagatgttgcccatgaagaattctccttcctggattgactcttaatcatcaggcatcattcctggtttgcttctctacgaatctcaattccaacttctctgcagagtctgtacagtgattaagccatgccagatggtctttggtgcacacagttatttaagaatccacttccacaggtggctgcccttgtaaggaagaatgcatccctaaatgtggccaccagagagttccagtgggcagatgtctgtggctgcccttctcatttaaggacatgagttcactggagtattactcaaaaagtctgtggttcatttccagtattgtgaatatttagtttatgtggccgtttctttgtttctttgaacagtgggattttcagtgaaaaagtaccctctttttcatttcctattgcagtggtcacagctaatagtgtctgaacatggttcaagaataagagattccatgtagcattttctttattattttcatttcccttatattatccatcattccttaaggacaattattcttaataatgcttatagaaaatgttctctaattaaacatgccaaaaggaaaaagtaagagaaagagggagcaagaagaaaatggaagaaaaagggaaaaaagctaaccggataaccaatttgttataagttggttttcaacaaagaaatttagcagccaagtaaggtttcaagggaatattaacttggtatcagggctacttttttttttttttttttacttgcatgtcatccttaatgtctaacatgaaaaatcagcaaagagtatggtttttatcaagaatttgtgttgggagtaaaaactgctttatagctcccaaattaggaagagaagagcagaaatcctctggggcatttaaccatctggcagaattgttgctgcacccttatcccagttataagacagtcaaaatgactatttcctaaatattgtgagtgtatgaaatgtgaaattaaagcaaaaactggagacttttaatgtatttctttaatttgaaatgttttgtggattgtgaaataaaaataaatttatgtcaagttttattcaaaattcatttatgaaataatgccaacactgttctaaaaagcaaggagtcaagaaattataaaattcagattaaatcaggaaaacacattagatggaaaattatactatagaatttgagcttattaaaatttattgcata

SEQ ID NO: 1955 - DNA, 207 bp, Homo sapiens
ggccgggcgcggtggctcacgcctgtaatcccagcactttgggaggccgaggcgggcagatcacctgaggtcaggagtttgagaccagcctgaccaacatggagaaaccctgtctctactaaaaatacaaaattagccaggccgtggtggcacatgcctgtaatcccagctactcaggaggctgaggtaggagaatcgcttgaacct

SEQ ID NO: 1956 - DNA, 216 bp, Homo sapiens
ctgcccccatgcagtggtagtcaccgttctgtcccccgcgggtgctggtgagaaaggtaaaagggcggttccagagcctgagggcctgtgagtgcagtttacataactgccgaaacttaaggaagcgtctaaataaaaagaaacatgttaacccaaaatggtttatttgtttttttttttttttgggttccagagctcatgccaacatgcaaaaaa

SEQ ID NO: 1957 - DNA, 3598 bp, Homo sapiens
atggggcggccctggccagaagcggaggaggtggcacccgggaccgagctggggtcttggaggaagagagggtgaggggaatacagtactgggggtgagagaagggttggacagaagagggtcgggtatctgggcatgcgcagggccgcaggactcttggtggggtagcgagggggacggtcccacgactgctccgaagggccgggactcccagtgggggcgggacccccggagtgcccgcctgcggactcccaagcctggagcctggggagagggtgggcacctccgttcccgcacacccgtccatggtgtgtgcgccgagcgtccaggagccacggcggtgtcttccttgcgcgtcttttacacgtgtgggggtaggctgctcctcggggctgagccgtggccagggttatggagaggcccgcctctccccagatggcgtcgtcgagccctgactccccatgttcctgcgactgctttgtctccgtgcccccggcctcagccatcccggctgtgatctttgccaagaactcggaccgaccccgggacgaggtgcaggaggtggtgtttgtccccgcaggcactcacactcctgggagccggctccaggtgggttagactttatggggtgctgggaggtgtggcagatctctgcattcttttaagaccttcttccctgctccccacacctgggaggctgccagaagtagtggaagagcatgagctttaggtctaccaacctggacctgagctcattatgtagcctcagtctacctcagtttcctcttctgtaaaatgggaatgagaccttcctcaaagggatctataaggtaattggcagagtgccacactcgaggggccgcccctctatgagtggacgcttcctttctcctccctcacctccagtgcacctacattgaagtggaacaggtgtcgaagacgcacgctgtgattctgagccgtccttcttggctatggggggctgagatgggcgccaacgagcatggtgtctgcattggcaacgaggctgtgtggacgaaggagccagttggggagggggaagccctgctgggcatggacctactcaggtgcagaccctgcccttcctcatctgcctgacacaccagaaatctaggggctgagttttgacctgggcccatccatccctcccccagcctggttcacaggggcctcctcctctctgcagactttgcccttgtgccttcgtgaagaaggctgcagcagcagccacctttgggcctctcctggcccagaaatagagcagtggttatttatttattttcagttgaaatcttacatagagtcccaatttataaaaccagtaatagtggatggagcagctctgggtggagagaggttaggggctcaggacacttctctctctgaaactgtgtttcaggccttttcatggaaccctcaaagcatagcacatggaaccagagcattgaaagccactggcataattgcatttgatacgatcagtgccagcagatttgctgtgtgacttgggcctatcaccaaacctctccgggcctcttctgtcccctggagcttctgccaccagccattgatccctctgtcacccttctgtcccttggccctctcttttgccaggctggctttggaacggagcagctctgcccaggaggccttgcatgtgatcacagggttactggagcactatgggcaggggggcaactgcctggaggatgctgcgccattctcctaccatagcaccttcctgctggctgaccgcactgaggcgtgggtgctggagacagctgggaggctctgggctgcacagaggatccagggtgaggtgttccctttctcccagctttgggaagtgggagagatggtaggggcagggaggggcccgatccaggtgcaagcctgtcaggacatccagggagatgggagatgagcccacttgggaattctcctccccttcacttggttaagtcttccgtgtgctacagcctgttgcttcctctgggaagccttcctggacttccctgggtggtcaggtttcctgcttatatgcaagcaggtacttctttttcatcgcattcaacacagttgcatgcttacatttatctctgtgattattttgtctgcctcccccaccaaaacgtaggctccatgagggtaggtagttctcttctccaccatgttctcagcacctcgcccagtgcctggcatagaatagatgctcaatggtaaatgaaccactccccgatctcctccacagagggggcccgcaacatctccaaccagctgagcattggcacggacatctcggcccaacacccggagctgcggactcatgcccaggccaagggctggtgggatgggcagggtgcctttgactttgctcagatcttctccctgacccagcagcctgtgcgcatggaggctgccaaggcccgcttccaggcagggcgggagctgctgcggcaacggcaaggttagtgaacggtggagggggctgggggccaggagggccacagcagtgccagccactctcccctcccacagcttccccctctactccttggcagggggcatcacggcagaggtgatgatgggcatcctcagagacaaggagagtggtatctgtatggactcgggaggctttcgcaccacggccagcatggtgtctgtcctgccccaggatcccacgcagccctgcgtgcactttcttaccgccacgccagacccatccaggtgggaagaatgagggtggggaaggctggggagaagagaggatctgatatatctccgtgcttccatctgtgcccctctaggtctgtgttcaaacctttcatcttcgggatgggggtggcccaggccccccaggtgctgtcccccacttttggagcacaagaccctgttcggaccctgccccgattccagactcaggtagatcgtcggcataccctctaccgtggacaccaggcagccctggggctgatggagagagatcaggtatcccccagggagtaggggctaccttgaggggatgatagacctcccccactcccagtgggactctggaaatatgaaggaactagggagtggaagagatttcagagctggggagaggagttcctcccttcaaagccagcaactgcctttggggaatgtcggggggtatctcctttctcctgcttgtgtgaggtggtacacagtccccccttcacctggcgggaagcctgtcccggacagactcatctcagctttcccttggggcaggatcgggggcagcagctccagcagaaacagcaggatctggagcaggaaggcctcgaggccacacaggggctgctggccggcgagtgggccccacccctctgggagctgggcagcctcttccaggccttcgtgaagagggagagccaggcttatgcgtaagcttcatagcttctgctggcctggggtggacccaggacccctggggcctgggtgccctgagtggtggtaaagtggagcaatcccttcacgctccttggccatgttctgagcggccagcttggcctttgccttaataaatgtgctttattttctcttcagtgaa

SEQ ID NO: 1958 - DNA, 5689 bp, Homo sapiens
tttagaatcaggtggctcactgagctctgtattttgtttcctggagctttcactggtttcttcccctgagataccccaagtgacatgaaaagcatactcagggcctagagacactttactggggatgggcttctgtcacaggtcagaggtctgagaagaggggcaggccccactcctctccactagtagagaaaggttgacagagaatcatttcttgcttctcttggccgtagttttggttgtgctgggggcctcagccacagaggccttgggggctgtggctgctcgtgcccccttccttccccagaaagagctttggtggcccctgggaatcagactgcatggtttcttggtgggagaggaggcctggggtgaggagacggcctcagggactgtctcctccccttgcgcaggagtggcagaagggctgctgtccccagccatgggcaccccaggtagcaggggcaggtcggtgagggtgggctgcatctccatcctcagcaggtgctctgtcagggccgtctgttgccggtgctccctgtgcctgctcagctcctgctccagctccttgaggaagcctgggaggggccgggggtggagggtacagggtgggtggagccctgggctcagcaggagggtccctgggctcagggaagtctctggctggccccttgtcccttgtgggaaggagcctgaggctggggcccaggactgacacctggctctggcccagatgttgatctgaacttggggctcccctccccggacgccactgccaccttagcttccctcatgtcccacagggcagaggtgggctctggggaggctgaaaaccttggaaagcagggtcacctcgttctgagcagaatgggccactcagctctgggaactcctcatcgcttgaggcttcatcctcctcatccgaaatccagcgctccaccacaggctgcccgtccaggtccaggagaagtggcagggcttctgtcaccagctcgctgcagagcagaaggagcagaggttacccaggagggcaccctggcgtggaggatgcaaagacacgcaccacagcactcacacccggaggggtggtggctcatgagctaggtaggaggtgggggagaaggtgtcatggacaggaccccaggtttgcaggctgagaggggtctgggctgagttagcaggtagagctcagccatgacctttcttcccaccctccactccttaccggtagccatcctggttggtgcagctgtttccagacaggttgaggatgagaaggctctgggggaactcatctgcacacagcaaagagagaggaaatggggttctcacttgatcttagccaaaagaccatgaagcgatgggaatggggttctcatacccactttctagtccaaagccagtacctctaggcacaaccccttgaactccctgaggatgaaatgtggacctgcaggggcatggctaatagaagcatgggcagatgggtgcagaggggagggcaggccccacaggggatgtgtttggtgagccagggcgagtgggttcctacccagcttcaatgtttctatcaggttctcagaaaggtccagaaactggaggcatgggaggtcgaggaggttttccacctgcctgatttggtttcctgccagagacaggaagctgtaggggaaggaaggggtacagaggcagagctgaatcatggaacagctggaagaaaagaggagggcacctgacaccggggcccctgggctaggcagctgatgaccagtggggacacatggccttctggggtgagggagtagatctaggcttgctggtccttgactgacaaggacccaggcttggagaaatctgaaccagttctttgggatatggctaggttcccccaacccctcttcccctgcctgagccctggcaccacataccgcaaggaggggatgcaagccaggttctcaatttgctggatcttattctgcaagaagaaaccgaagtggggaaaccaagctgagatcagatgcgtcaggggccctttacggggacaaagccccaagaccatgtctactctgcagctggagatctggcactttgggaatgatcaccccactccttgaacaggttgccactaccttaagaaagatgattttctttccccatgtggatggttaagggtgtaaacctggggtatctaaacctgactacgtatactcttctgattccacaaccaaagagtgacctgggaatcagaaaaggaaactaagaagccaccaggaaaacggaaagggccttggtggtggcttgcatacacagagagaacaatgagcatacaggaacttgacggttaaagtttctatggggaaagttgaagcgagctgggaatactcaaccaggggaaggctgaagatcaaccaaccaccaccaccaccaccaaacagccttcaagtaggatctgaatgatgtacaggaatcttcatagtttcctcttcttcaaaacaggaaatgggctggagctatttaacgtgaaagatttagagtagatgccaaaaagaacttctagatcaagagaagtgcctaaagaacagtggaaggagcacaggtcatgttcaggatctattttgagggaattagtttttcaattcaggaccctatgtcattcgtctgggaatggtttaaatgaaggtctgcctgcctgaacaccagggaatgggcaggatgacctggttggctcctttcagatgagacagattaggtccacaggggtcaaggggaggggaagggtggagaaagaagttaccccttgcagatagagactgtgaagattctggaggccttctaagttcctgatagtagtaatcccctcccggtccaggcggacagtctgcagttcatcaagagtgtgaaacctgggaaaagagtcagtaagggtggtgttagagcaccactcatgtggtctcttagcagggaggatgggagacggaggagggaaggggtttcaaggaggggtagttggctgagtcattttaatcagatgtgagaaacatcttgacatcttgaggtggtgtctagatcatgaaaccggcttgacttgcagactcgtatctctattgttagcactgggaagggtgagagagaggagtaagggccctctgggaaattgggggatggcagcttatggtttctggagagattcagaggcaagagaaaccttcctctggccagcttggatggtggaggcaggggtgggacagagatgagacactgcagaaagatccttcctcaccttccttttgagtcgttcatggagaaaaaagcacttgttccatccacccattcattcattccacaacattgctgagtgcctactagagacaaatgacagagtctctgcccaccactaataaagaagcagggcaggctgaccatggtggcttaccctgtactcccagcactttgggaggccgaggcaggaggatcgctcgagcccaggaggtcgaggctgcagtgtgccatgattatgccactgcacttcagcctgggtgacagagcaagaccctatgtcataaaaaaaaaaaaaaaagaggctgggcgaggtggctcactgtaatcccagcactttgggaggtcgaggtgggtggattgcctgaggtcaggagttcaagaccagcctggctaacatggtgaaaccccatctctactaaaaatacaaaaaaaattagccgggtgtggtggcgcacacctgtagtcccagctactcgggaggctgaggctggagaatcgcttcaactcaggaggcagacgttgcagtgagccgagatcacaccattgcactccagcctgcgcaacagagtgagactccgtctcaaaaaaaaaaaaaaaaaataggaagaaggccaaacatctatgacaagtggataacagaggcaagtacaggggaaaggaagaaggaggaggaagaagggaaagaaggaggaagaggaagaagaaagaaagaaagaaagaataaggccaaacatccctgacaagtggataacagaagcaagtacaggggacaaagggagtacataggctgtgcactaaattcacagtaggaggaatcagggaatgcttcctagaggaggtgacagatgagtaggcattagccatgaaggtggggggatatggggagaaggcatttcaagcagaaggaatagtacatgctaatacagcccttccgaaactccaatatgcccatgcagattctaattcagtagatcgggtggaggggctgagatgctccacttctaacaagccccctgtgatgccaatgctgctgtcctacccctgcaccccctcccatccacacatactctgagtagtaaggtactaaggtgtgagtacacagtgtgggaaattgtacacttgtggagagtggccagaaataaggctgaaaagcagaagtcaactcatgcttaggcattgggatttatttgggaggaagtttctatcagtgaatgcctgattagatttgttatttaaaaggatcactttggctactcaggaggctgaagtgggaggattgtttgaggagttcaagaccagtctggccaacagagcaagaccccatctctaaaaaagtaattaaaaatactttactttttgtttgttttagaaatagggtctcaccctgttgcccaggctggcatgcaatggcatgatcatagcttactgcagccacaggtacctgggttcaagtgatcctcctgtctcagccacctaggactacaggtgtgcaccaccatgctcagctagtttatttttattttttagagataggattctgtctctattgcccaggctggtctcaaactcctgggctcaagtgatcctcctgcctcagcctcccaaagtggtgggtgtgtaggagagaggtgaacacggccttatctaagacagttgagtgaggatggtgaaaaagaaatggaattattttgaagaagggaaaatcagctgggcattaccactgattgaatgtgtggagtaaggagagaaacaaagatcagttgacaaatcagtacacgtcagggacctggtcatcctgagtgtttcagccttctagcaccccttttctcccccatgcactcacatcttctctgacagttccccatcttcagggaaagtcaagttccgcttagtgataagggcttcagtgatgcagacgcccccttcctctggaccctgggctgacttccctgtgaaaagatgagtccaactgtgacacttcctcactcttggaggccttaccccgctgttttccaactgctctacccaccgtcccacctccctactcacctccagacatgatctaaaataaaaggctgctggtctgaggcgggagaggaacgaaaagagaggtcttggcggcccctaaggatggcagaactcaggatggcaggaggagagagaaactcagagacttaggagaggaggaaagggggttgattcagagaaaattgctggggtgaggtcgaagaaaacagtaaattgatgtgaagggtctggagtttgaggggtgtggaggggctttgctggcagcaagctggggtgttgtgggcaggaatggttgagaaaggagcagttcctaggaagccggagtcgttgctaagagactggacgccgagtggggaggtaaaggcgggctccgttggcccgg

SEQ ID NO: 1959 - DNA, 776 bp, Homo sapiens
  misc_feature (709)..(709): n equals a,t,g, or c
  misc_feature (738)..(738): n equals a,t,g, or c
tacaacgtcgtgactgggaaaaccctggcgttacccaacttaatcgccttgcagcacatccccctttcgccagctggcgtaatagcgaagaggcccgcaccgatcgcccttcccaacagttgcgcagcctgaatggcgaatggcgcctgatgcggtattttctccttacgcatctgtgcggtatttcacaccgcatatggtgcactctcagtacaatctgctctgatgccgcatagttaagccagccccgacacccgccaacacccgctgacgcgccctgacgggcttgactgctcccggcatccgcttacagacaagctgtgaccgtctccgggagctgcatgtgtcagaggttttcaccgtcatcaccgaaacgcgcgagacgaaagggcctcgtgatacgcctatttttataggttaatgtcatgataataatggtttcttagacgtcaggtggcacttttcggggaaatgtgcgcggaacccctatttgtttatttttctaaatacattcaaatatgtatccgctcatgagacaataaccctgataaatgcttcaataatattgccaaaggaagagtatgagtattcaacatttccgtgtcgcccttattccctttattgcggcattgagcctgtctgtttttgctcacccagaaacgctggtgaaagtaaaagatgctgaagatcagttgggtgcacgagtggngtacatcgaactggatctcaacagcggtnagatcctcgagaggtttcgcccccgaagaacgtttttc

SEQ ID NO: 1960 - DNA, 878 bp, Homo sapiens
  misc_feature (741)..(741): n equals a,t,g, or c
gaaaaccctggcgttacccaacttaatcgccttgcagcacatccccctttcgccagctggcgtaatagcgaagaggcccgcaccgatcgcccttcccaacagttgcgcagcctgaatggcgaatggcgcctgatgcggtattttctccttacgcatctgtgcggtatttcacaccgcatatggtgcactctcagtacaatctgctctgatgccgcatagttaagccagccccgacacccgccaacacccgctgacgcgccctgacgggcttgtctgctcccggcatccgcttacagacaagctgtgaccgtctccgggagctgcatgtgtcagaggttttcaccgtcatcaccgaaacgcgcgagacgaaagggcctcgtgatacgcctatttttataggttaatgtcatgataataatggtttcttagacgtcaggtggcacttttcggggaaatgtgcgcggaacccctatttgtttatttttctaaatacattcaaatatgtatccgctcatgagacaataaccctgataaatgcttcaataatattgaaaaaggaagagtatgagtattcaacatttccgtgtcgcccttattcccttttttgcggcattttgccttcctgtttttgctcacccagaaaacgctgtgaaaagtaaagatgctgaagatcagttgggtgcacgagtgggttacatcgaactggatctcaacagcggtaaaaaccttgagagttttcgnccccgagaacgtttttcaatgatgagcacttttaaagttctgctatgtggcgcggtattaatccctatttacgcccgggcagaagcactcggtcgccggatacactattctagaatgacttggttgagtactaacca

SEQ ID NO: 1961 - DNA, 150 bp, Homo sapiens
cgtcgtgactgggaaaaccctggcgttacccaacttaatcgccttgcagcacatccccctttcgccagctggcgtaatagcgaagaggcccgcaccgatcgcccttcccaacagttgcgcagcctgaatggcgaatggcgcctgatgcgg

SEQ ID NO: 1962 - DNA, 25211 bp, Homo sapiens
  misc_feature (15723)..(15724): n equals a,t,g, or c
gagccaggcagtgagactggctcgggcgggccgggacgcgtcgttgcagcagcggctcccagctcccagccaggattccgcgcgccccttcacgcgccctgctcctgaacttcagctcctgcacagtcctccccaccgcaaggctcaaggcgccgccggcgtggaccgcgcacggcctctaggtctcctcgccaggacagcaacctctcccctggccctcatgggcaccgtcagctccaggcggtcctggtggccgctgccactgctgctgctgctgctgctgctcctgggtcccgcgggcgcccgtgcgcaggaggacgaggacggcgactacgaggagctggtgctagccttgcgttccgaggaggacggcctggccgaagcacccgagcacggaaccacagccaccttccaccgctgcgccaaggtgcgggtgtaggggtgggaggccggggcgaacccgcagccgggacggtgcggtgctgtttcctctcgggcctcagtttccccccatgtaagagaggaagtggagtgcaggtcgccgagggctcttcgcttggcacgatcttgaggactgcaggcaaggcggcgggggaggacgggtagtggggagcacggtggagagcggggacggccggctctttggggacttgctggggcgtgcggctgcgctattcagtgggaaggttcgcggggttgggagacccggaggccgaggaagggcgagcagagcactgccaggatatcctgcccagatttcccagtttctgcctcgccgcggcacaggtgggtgaaggagtgaatgcctggaacgtactgggaactgcaccaggcacagagaaagcgggcttgccattatagtgggttccgatttggtttggaaaacatgggcagcggagggtggagggcctggagagaaggccctacccgagacaggggcggggtgggaaggacggcagatgctgggagcacgaggcaatttctttatgacacagaactcatgctctagtattccatctgtttcagccgaagaaaagaaccagctgaaggggcaggggagaaggggcggaggtattctcgaggcccattggcgtcctttaggactcaggcagggaagggcccttggtgctctggagccggaggtggtgcgcctggtactgggaccccggagctgagcccggcgcctcagcccacctggctgtctgccgaccgtgtgcggggcgagtttgctcaacaactctgccagcttctggccctcaggctgtgggaagcttcttcccggggcgagaccactagctttttctaagtattaccagcccaggacttggctgaggttctgtgtcccccagcttggagtcagatgtggggttgaatcttggcttcctctcactagctgtggtgcttgacaagtcacttatccttgagcctccattgcctaatctttaaaagggaggtgacaatcgtccctacggctcagtggcagcagatggggagatgaagggaaagttctgttgaccatgagtgaacttacaatgcaagccccggggggatcacttgcagttttgtccctgtctgcagtgtgacctgttggtgacattgtctttgctccaaaccacagctcctggggcagaggggaaaattctgccactcacagctgcctgcccacgcttctgtctgagtgtgctgggtggcaggatggcaagtccttactcagctcagtatagccctcttccttgttccctgagcctttgactttctcgagggatgttgtggggttgtggccaggataagaaagggcatttcaagttaccactgctccaaaacaactgttctggaaatagtgagtaccccatcctgagaggtgagtaagcagaggctgtatgaccacctgaaccaagcccttgaggatgtttcttctctggtggaagtttggaacaggagcctcctcaagttcatttattcattcattcaatggttattttgtgggaatcgaatttagaatgaaaatattttttggcaagcagaaaataatttttagaccaatccttttcttttagtcatgagaaactgaggcccagagagaggaggtcaccccaggtgcattagaactgggtttccagaactgacactccactgcacagagtactctcccaattcattcaatttttatttagcggaaggcattttcagatgggtctttgaagcattagtaggagttcagcgatgatggtgtcatgagaattttattctaggattaggaggtaccatgaacaaagatacagagctgggaaaaccagaggtggaagataaggagcacatgtccacagttctttttcttttttttttgagatggagtttcgctcttgttgcccaggctggagtgcaatggtgcagtctcagctcactgcaacatctgtctcccgggttcaagtggttctcctgcctcagcctcccaagaagctgggattacaggtacctgccaccacgcccggctaatttttgtatttttagtagagaaggggtttcaccacgttggccaggctagtcgcaaactcctgacctcctcagtggatccgaggaggtgatcctcccgcctcagcctcccaaagtgctcgaattacaggtgtgagccaccacgcctggcctccacagttctttatccaccgtctgaaatgtaaaatgttacgaaaaccaaaagttttttttgtgatttatttgatggtagcacctgacgtgaactgacatgagattatttttaatttagttgtgtgaatatgcatattcatatattttgctgcatagattacagtatgcagctccagattcttccaagcagactctgattgcccattactgcctttctaaaatccaaacaagttctgaggttcaaaaccgatttggccctaaggctttgggtaaagggggtggactctgttctactctgactggagtccaagatgcatatatacagagatatgggtgatggggctgcaaggtaggttgaggtaggggccaaggaggagcatggagtttggacttgattcatgaggctgtggggagccagtgaaggttcttaagcaggtatgtctgcctgagagcagttggagcagacaagagctaaaaaccaaacaaatcaccatagatagtggctgctataatttgtttgtcccctccaaatctcatgtggaaatttggtcctcagtgttggaagtggggcctaatgggaggtgtttgggtcatgggggaggaacccctgtgaaaggcttggtgccgtccttgtgataatgagtaagttctcccgctatgatttcccttgaaggctgattattaaaaagagcttggcacctccctctcttctctcttgcttcttctcttgccatgtgattgatctctgcacatgtaggctccccttcaccttctgccatcagtgaaagcagcttaaggccctcaccagaagcagatgctggtgccatgcttcctggagagcttgcagaatcatgagctgaataaatcccttttccttgtaaattactcaccttcaggtattcctttatatagcaacacaaaaggactaagacagtggccttgacttttctctctctttaagaagtgttgcctttgctcacttagtcatcccttctgcctgcatttgtagagcatctggatgggagatttatataaccgtcactcttgactttcccagcaggcctatgtcataggtactgtggtctctacaatacagcagaggtatctgaggctccgagaggttgagtgacttgctcatggctgcacaaccagtaaatattggagctggaattcaggtccacggtttcctggctccaaagcccatgattttttccctcaatttattctgactggggcatgggggagggggtggcctttgggcagggccaccaggagcgaccaggcccgtagagagctgggtgcaggtacagaggaaaacctgttgtcgagtgtggcccgtagttcccatttttgcctgaatggcacatttgaaagtgttatataaccatgtgaataataatagttggcctatatgagttttttaatttgctttttggtccgcatttggtaacttctttatcatctactatactctgttgtgtctcttttgttgtaatttgtaagtaggggtgagataaagtacacctagggtttgctgggtttcttccatgtcatcatgttcctccttgcatggggccaggatccgtggaggttgcctggcacctacgtggtggtgctgaaggaggagacccacctctcgcagtcagagcgcactgcccgccgcctgcaggcccaggctgcccgccggggatacctcaccaagatcctgcatgtcttccatggccttcttcctggcttcctggtgaagatgagtggcgacctgctggagctggtgagccaccctttttgggaatggcacttcctgatagggctgggccactgcatatacactggggactgtgcttagtaggcccattgctgaaaatcagaaggggacagcaagtatgtattgagcacttatcgggtaccaagcacagtaactactggctttctgtatagaattccctttaagcctggccatgccccagtggtacgtctatcttcatttgaaagacgaggagactgaagttcagaggggaccacacagacagctaggggtagagcctggatcaaacccattggtctgcctgccagccattcttgtgccaatgcatctgctgcctacggaaacctgtagggacaaggccctgggatgttcagtggagcctgagtcattttataaaaaagcatgactctagggtccaaaattcctttgaagctgttgctatccagagtgaagtcccttctttaggacagggtggccctcctccctcctggatgtcacatcttcggtggaggggcagaaaggggactgggtattctcctcaccctggccctagtgcttcaaatcttaaaaaaacgtttttatttgtgcttctgcaccaccttctagcccacctcgtttcctggcctctaacttgatgagagcgtgtgtcattttcacactgattctccacatggcaggcggtgcttcttagcctcctgcagacagtgaggccccacggtcttgtccaaggtcacacagcgtgtaatgggcagggtcagagtctggagtctggacctgggtctcctagctgcactgcactgctgccccatgggttaatcagctcagcataccgtggctgaacagctacctcataccaaggcctgtggcgccatgacagggattgacagggtccctgccttggaaacccgtagtctaagtagaggagactgacaagtcaatgccttccatcagtctgctcaacacacgtttaccaagtgcctactgtgtgctgcagaggcgaagatgacacagctcaggcctttcccttgagcttacagttcaggaggagagactgaccagtgactgccagtacagttgactatgggacaatgtgctcagccttggggagagacgaagaaggtacccgtatagcaccagatgacaggcacgagccccacaggccagggcagctgctcagaggagagtaggccaagcagaaggcaaacagaaggctgcaggcatttgccatcgagagctggacttcaaactgggcatcataccagcctgggttcgagtcctgcccagccccttattggctgtctaaccctgagcaaatcccttcacctctctgagcctcattcctctatctgtaaaccagttataataattggaacattcatttaaggactaaatgaggtcgtgaagcattcagcagatgctaggtacggaaactcgctgaagtgggggcaggttaagaagcctctggggatacgaaggcatccagggactagttgtggcaggaggctgttaccacttaggtctgaagggtaaggagagggaatagctttccctctgcccagttggagccggtggcatggaggagaggctgcctgtggggaatcacccgagggttcaccgctgccatgcgcagggagtcaggaggtagggagggagtggggcagatgcacaccatttttttttttttttgagactctgttgcccagactggagtgcagtggtgccatatctgcacctctgcctcccgggttcaagctcactgcaacctctgcctcccgggttcaagcgattctcctgcctcagcctcccgagtagctgggactacaggtgtgtgccaccatgcctggctaatttttgtatttttaatagagatggggtttcaccatgttggccaggctggtctcgaactctcgacctcaggtgatcccccacctcggcctcccaaagtgctgggattacaggcgtgagtcaccgctcccagctgctgatgcactcttgtccttctaactcctgctagtgcctcccattggctgagcccaactggaagctttgcaagggagctggtgctgcagtttgcactgagcaggctggagaaggctggagaatagactaggggacaaaccgaattgccagtgctgttatgtcatgatttaggcatggagtccagggcctgagcttcactccatgtccatcctgcccagagccttggcacagcctggctcccagacaagatgtcaagttcagaatccttcctaaaaggaatcctctatgccagaccgtgttgcagggatatgggggtgctgggctcccagcctgatcaaggagcgagaaaactcaggctcctagtctgtcctccggggcactagcagggacaaggtgggaggctgctgggctgggatgtggggacaggtttgatcaggtaaggccaggctgtggctgtgtttgctgctgtccaaatggcttaagcagagtcccccggcctctctggcttctgcaggccttgaagttgccccatgtcgactacatcgaggaggactcctctgtctttgcccagagcatcccgtggaacctggagcggattacccctccacggtaccgggcggatgaataccagccccccggtaagacccccatctgtgccctgccccaccccatctgagctgaatccatttgctctgccctggcctggcctccctgctggtggtttccacttctcggggggctttgggactcagcacctccactgacccctttttttctgtcccatccccatcccctgcagcccccactgcctgccttcctgttgccccacaaatgcaaaagtcttgccttaaatgatcctcttttcctccttttctcttgttttccttttctcaccatttggaatggcccagcaggctgcacttaccttggaaggagggttcatctgatggtgactctacctagggcccccaggcctctataactcccagtgccctgcagactggaccagatcctttaatgggatagacacaaccctgtctgggatgcctctgcctaccttcctgttttgctgctccacctgcctccagctccgtttggcttcctggggctccctgcctgggccactttgtgtcttccctctaggcctttctttccactgttccctctgcctggtgtggcctggctatggaagggagggagcaggagcggccatggaaaacggtctgcattctagcagggacttgcaggtggcaattcagtcggggaagactctagatgcacctggcctgaggagagaatgaagggttctagttggactgtgttaagtttgaggtgcccatggtgtgaggtctggagctcagcgcagagatgatgcaatgtggtgggtccatgcaacatggtgccaggacgcagagcttggggtgaactcagctttcaccccttaccggttctcgtgggatcttgggaagccactttcttctatgagctttgtcgttcttgtctgtaaaatgggcacataaccctgtccctgtccttctcacaggttgctgtgagactccaatgagttgaaggatgtgcagatgcttttggaagtgaaaagttggggggctactgtgtgactttgcatacacccaaactgtgtgaccttgcatatgtctgagttgctgccattgcaacagatcagagctggtgggctgggtgtggagaaagggtttgtgtgggggacatcctctggcaagggtggcagcagcagaagtgaggggcctggtcggtcatgtgtgctgacccggcctgggcagcctgtggccagggagaggacagctcctctgtaggaagagcgtgttcctttccaaccaggtgagacctcttcagtggagccctggagccccctgtactccacatcagtgcctcagggacctcccggagcaggctaatatcagagaccaagagggacactggcagaggatcacagagaccccagtccaggcagggactgagaagatcttgccccctaagttagtttcctagcactgctgtgacaaaataccaccccctcggttggaacaagttgattctctgcagtcctggaggccagaagcctgaatcagtgtcggcaggaccactttctcccggggggctccagggagaagcttctcttgcctcttccgtgtcccaacagcggcagcacaccaatcccagcctctgtcttcacacagccttctctgtgtctctctcctcttcattgtctcataaggacacttgtcattggatttagggcccactggatcctccaggatgatctcatgtggggaaccttaaccacatctgcaaggaccctttttccaaataaggtcacagccacagtttgtgggggttaggatgtgagtgtatctctttggcagccactgttccctcctctcccttgggccagaagcagacgtggggccctttcttccccataggatgcccatggattgccccccttcccgcttcccccgagcgtctgtgggaggtggcaggaatggcaggcaggtgtgtggaaccccttctggagtcatatcaagggcttggctggaggaagtcctcctggagctgttgggctggcatggggcaggctggctgggcccagcagcagcttcttcattcatggggaggccacaagcatgggccctagagctggctgccgccctcaaacccagaccctgcactcttaactgtgtgaccttgcatacgtcactcaccctctctgatcttcaggttcctctgcaaaagggaggtaatgataaccctcactctggggggctgtttggagggttaaatcagttattgctgtagcatgcatttctctgtcaggtattgagtgaggtgctgtgattttagccctgcatttttcttttcttaccattcaataataacgttttgagcaccctctgtgcgccaggcaccatattaggtgctggggatacaaatgtgaatgaaatgaatgtggtctctttccccaacagtgtatccagaagattaatccattccttaaacaaatgctacttgacacagattagttctggataggctgagagctctgaaggagtgcaggcagctgcgagcctgtgtatccagcagaaggatcaggaaaggattcctggaggaagcgctgttctagccaagacctacgggggcattattaaccaggcaaaggggacggtgtccaagcagtggaatgaacgtggattgaagctgtgaggcaggagggagtgtggcctgtgcagaagggaccgaggctggtgagaccagcagggcctgggtggcctccaggtcagatgtgaaaggaagaacttggccacagtctgagcttctcaggcgtatggcagggctgcctggtgagagggaatgagctccctgctctggaggtatgcaagcaggactgggctctcacctgccagaggccacagagctttccagaggctggaagaggccactccaaggcctctttgcccctgagagtggtggctcttcttgaggccaccttgccacgctgtcacagggaactagcagcccctgcctcacccgggggtttggaagatagagggaggcctaggaagggccctgtgtctcatccgagctgggcccctttccagcctctcactggaaggaagcccaaggatgttcctgtgggggcttttaccaggcccacctgccctctgctggccatgcttgcagcctcctgaccctgtcccagcaggacagtgggctggtgtgagcgggcaggaaccgcctgcacttagaaggtgtggggctgcctccccgagcttccatctgccgctggggccacaccccaggcccagggatgggaccccatagtggtcacatcatcttgcagcagaacccaggtacagctcctggagcagatggtggtcccaagcacgggtgggaccagaaaggactctcacctgggctaactcagctgcagcctcagttccctcctcacacacgaggaacatggactggaagcctgcccagcaggccttctgctcgatgtgcgttgtgtggcttacgtccagggagggaagcagcctctgtgctgtcttctagataagcctgtattccccgggctgtctgccaatgtatccagttgtcccgtcagcctggaagctctgagggaaaaccttgggctgcttcctgagcacctgtatcccctgcagccagcccggggcctctgctaggagcagactgagcatggcttatgggcctggcaccatctggcctctgcccaccttgctggccttgtcttgtgtctgccccttcgacattccatagcccagctcaatatctagtggttcctctagggtggcgagcactgtttggtctccagatgtcttcaggtcggagctcacagcgctctcagccaccccttcccagtgtagcaccgggcacatggtagatgcctattgatgagtgaaagctcctaacacactcagagagcaaggactccgcctcatcccacagcctgggaggagaggcagactgccaaggacctgctcagcatgctacagaagaaaccaaagtgcccacgggactgatcagtggagcttcctgccgagactggaggccttagggcagggtagacagtgtgtgtgcaggctggggactcacagttcggactgtgcccagacctactagcatagtgggtgggtgggaggatgcgggactgggggccgaccttgcctgaaattcatgtgggatctcagagcagccactgaattgctctgtagggggctaaatagtggcccccacagatacacacacccagacagagcctgtgagccagaccttatttggagaaaaggtctttgtagatgtaattaagcatctcaagatggcatcatctggattatgcggtgggctgtaagtcctgtgatgtgtctttatgagagaaaggcagagggagatttgacacacacaggaggggccacgtggagacagaggtggagattggagaaatgtggccacaagccagggaacaccagcagccaccagaagccggaagacgtgaggcagggttcttcccagagccttcgctgctgagtctgggaatttgttaccgaagccataagaagtgggtacacgccctgagcctcccacacttgctcacctgtcctgagatgagaatctctactctgcagcatatttggaggatcactgcgggggccacagaggtgctgttcagatggcacttcagaagactcaggagaccctggggcaggagcagtttgactgacagcccagagggctgccctctgattccacctgaggccctgcttttcctggctgcaggggttccagggccaggccatttccgctggcgcaggactctgctagcagcaacctgcctgaagtcttcctttggcctggctgagagtttctgagacctgcgctggagcggaggtgcttccttccttgcttcctttcttcctctctcccttctccatccagcaggctggacctgcctggcatctgtgagctctccctactttctcctataccctaacctttgtcctgcatgggcgactcccccagtgagtctcttgcagcttttaccccagtgcctgcttcttggagaatccaaactgatccagttagggatgataaagtgtagggtaggtgctcggtgactgttttctctgaggttgtgactcgtgtgaggcagaagcagtccccgtgagccctcctggtatcttgtggagtggagaacgcttggacctggagccaggaggcccagacatacatcctgtccgagctgcagcttcctgtctctaaaatgagccggccagcgcaggtggccagacatcactgttattctcctttgagtctttaaatcttgttgtctttcttgcagactcggtgagctgtgaaaggctataataggggctttattttacactttgatactattttttgaacattcatattattgttagatattgatattcatatgaaggagcaggatgacttgggtccttcttggcagtagcattgccagctgatggccttggacagttacctgccctctctaggcctccctttccttgtctatgaaatacattatagaataggatgtagtgtgtgaggattttttggaggttaaacgagtgaatatatttaaggcgctttcaccagtggctgggatgtgctctgtagtttgtgtgtgttaactataaggttgactttatgctcattccctcctctcccacaaatgtcgccttggaaagacggaggcagcctggtggaggtgtatctcctagacaccagcatacagagtgaccaccgggaaatcgagggcagggtcatggtcaccgacttcgagaatgtgcccgaggaggacgggacccgcttccacagacaggtaagcacggccgtctgatgggagggctgcctctgcccatatccccatcctggaggtgggtggggactgccaccccagagcattgcagctgtactcctgggttgcacccccccagctgtcactgtcccctccctgccatcagttgtgggaagggcgttcatccatccagccacctgctgatttgttatagggtggagggggggtctttctcatgtggtccttgtgttcgtcgagcaggccagcaagtgtgacagtcatggcacccacctggcaggggtggtcagcggccgggatgccggcgtggccaagggtgccagcatgcgcagcctgcgcgtgctcaactgccaagggaagggcacggttagcggcaccctcataggtaagtgatggccccagacgctggtctctctccatctggacctggcctgggaggtggcttgggatgggcccagggagagctaatgtctcctaaccaagaatgctgtggcagcctctgccgcagagccagagaaccagagtgccaaggctggcagggttcccagtggccacgagtgcagatgaagaaacccaggccccaagagggtcatgcaggtagcccagggagttcagccttgaccctgggtcaatgacctttccacagttccacactgctccccttttaaaatccggtgatgtctttatgtcttttgttatgttatcttcaatgtggagggactcgaggtgatctaagcaaactttttctatcttctgcttgcatacctctgagaccaggggactcactcacttgcatgactgggccctgcaggtcacactggccaggcagatgtggtggaggaactggcagaggactttttctagactgtgactacatttagtccacccagcggcccccctatgaagtccagttgagaactaggactctgggggcctgtggacagagaagagggagggttctctcccttactgacttccttctgtggccagacattgagcaaggcctctgtacagcatgtcctggggctggccttgccgtagctgctaaatagttgacgaaaccagtccagagaggggaggtgactgccagggtcacacagctcaagctggggaactcgctgggaaaactgtcagctctgggcagcagcttgacttccattgtaagccccagcccccagggtcaaacactggctctggtgctggcagaggcagcccactagcctgtttcaaaggctgagaaggcccaggagtctgccctgtgctccaccagttctgccctgagactttcctacagagtacaggttttgatgttcagttttaaaggcaagaatcaataaccttctgccccatcaggtgaccccttgtgcctgtcccacccctttattgactgacctcggctcagtcaggtcagttcctgaaggtcagtgtgtggaggggaggctgttctttcccagaaaggccttccccaggcctggtgctctggcctctggaggacttcctggagaagtcccttctttggggtcccagtcagtgtatgggaagcccttattgcatgacctggcacggggtaggggctcaacagtcactattgccttccttgccactgccatttcctcctctgtaagcaggtgattgtgtgtccagtctgagcacagagataagcacacagcaggtgcttaataactagcagctgtaggctgggcgcggtggctcatgcctgtaatcccagcactttgggaggccgaggtgggcagatcacctgaggtcaggagttcgagaccagcctgttcaacatggtgaaaccccgtctctactaaaaatacaaaaattagccaggcatggtggtgggtgtctgtatcccagctacttgggaggctaaggcaggagaatcgcttgaacccaggaggtggaggttgcagtgagctgagatcgtgccactgcaatccagcctgagtgatagagcgagattccatctcaaaaataaataagtaaataactagcagctgtaaatgtggctgttgttcttcacctccacactcagtgccactccactccctccctccgtggtgtgaggggcctcactagctgtctcctaggaggagcatggctgtgagattccagctccatccttgaccacggctcctggagacatcttagaggccaggatccagaaggctcccacaccccatttgacaggggagaagctgtcagttccaggtccccttgcacatcagggccagagctgcgttaggcctccagtctccaggccactgggccagagctcacaggctggcagagggttagaactgttactggtggctgggtgcactggctcacgcctgtaatcttagcactttgggagggcaaggcgggaggatcatgaggtcaggacatcgagaccatccttgctaacacggtgaagccccgtctctactaaaactacaaaaaattagccgggcgtggtggcaggcgcctgtagtcccagctactcaggaggctgaggcaggagaatggcgtgaacccgggaggcggagcttgcagtgagccgagattgcgccactgcactccagcctgggcaatagagcgagactccgtctggaaagaaaaaaaaaaaaagagctgttactgttgacagtagcatgaggtagaccatggcctgcaccaaaagggggagtggagtgccactgaggccagaaggaaccacaccctcaagggtggggagttatggtagggggggtcctaggcatggagtcttttattctttagacaatcctgggagcagctgtccctgttcacagagggcggggccacacagctggtgagtgggcagccaagactctgttcaagtttgtgtgggtccaacacttgcggccacggtggaggggcatctgagccaggcctcagagagtggcggggggaagttgggtggggaagtgtnngccttctcattcctctgaggctcatcctcttggtgcctctctttcatggaaagggataataaggttattgtgaggatcccctgagttcatatattcagacgcttagacagagccaggcacagagaagggcccggggttggctagtttgattgctggtgtaattgctaatatcttccagtttgtattggtcaaggttctgcagagaagcagaaccagtaggaggtatatattaagagtttcaagctcatgtgaccgtgcgggctggcaagtctgaaatccgcagggcaggccatgcaggctggcaattcctgcagaatttgatgttgcaatactgagtcctaaggcagtcctggggcagaattccttcttccctgggaggcctcagtctgttctcttaaggccttcaactgattaaatgaggcctgcccaagttatagagagtaacctgccttactccgtcttctgatttaaatgttagtcacatctaaaaaatattttcgcagcagcatttccactggcttttgaccaaacatcaggccacaaagttgatccccaaaattaaccatcactctgtgcctgtaagggaggggctgggaaaggggagcaggtctccccaaggggtgaccttggctttgttcctcccaggcctggagtttattcggaaaagccagctggtccagcctgtggggccactggtggtgctgctgcccctggcgggtgggtacagccgcgtcctcaacgccgcctgccagcgcctggcgagggctggggtcgtgctggtcaccgctgccggcaacttccgggacgatgcctgcctctactccccagcctcagctcccgaggtaggtgctggggctgctgccccaaggcgcgggtagggggcggagggcggagggagggcgggcgggcaggcgggcttcttgtggcacgtgggcttcttgtggcacgttcctggaggccgaacccttctggctttggaaggagtcgtcagagacccccgccatgcgggaggctggggaggaaggggctcgaaacctccatcatcgcagagtctgaatagcagtggccccgccatgcgcccacgtagcggcgcctacgtagccacgcccccacgccccgtcctggccactctccctcctgaaggtcttctggtacccgccccctccccatctccatccccaggccctgcgtcctctgcccaatactctttgggcctccctgttgtccagctctctccgcggctccatgactgacaacttgagcaaggctaatgtgaatgggagcggttgagggctcagacctctcacccgaggaacatccacagagtgtgccgcatgcccggtgcagtgtggctgcggggacacagacacggagcctcggccctgaggagctggggggcagtgaccgtccctcctctgacccaccactcctccagtgtcaggacactgcgggtatctaggggaaggaatcttgttccacttcaagtctggaacttcaagtctgtgtgtgtgcgtgcgcgcgcgcgcgttgggggtgggggttgcagagcagatgcgtacctgacagcggtaacctaggtccccccggcctatcaaggcttccctggcggccgaatttaaaggcatcaagcaaacaaagcccaacacatctctgccttgtcctctcagtttccccccgtggcacttagaaccacttgatacaccgaatagtttccggtctatctcccccactaggatgtaaactccacaggggcattgggaatgctgcctggctatggtagggacagaggggagcaccagggcggggcaggggtgccagagttctgcctgggcagtcagattttccttaggaggggacatttgagtgggacccaaacaggtgtatagcagttgtccagcccagctggcaaggcctgagtctgcctctgcaacccctctcttgggctcctttctctgccacccacctcctcacctttccaggtcatcacagttggggccaccaatgcccaggaccagccggtgaccctggggactttggggaccaactttggccgctgtgtggacctctttgccccaggggaggacatcattggtgcctccagcgactgcagcacctgctttgtgtcacagagtgggacatcacaggctgctgcccacgtggctggtaagtcaccaccccactgcctcggccaccgtgatgctaacagcccctttggcagtcagggtctgtgccgggacctccagtgccaggctctgtgcagggggaccagagatgaagtaggcctgatggtgccttcaaggacactcagtctgatgagggaggcgagtgcacagagggaacacgaggtcagggctgtattagagggagcccagaggaggcacctgcccagcccgagggtcagagaaggcatcttggaggagggacatttgatcgggagcttgatggatgaataggagtttacctggccgataagacagcaactaccaaggcttagaggtgtgagaggaggctgtcttacctcactgagtaaggactgcaggcggcttaccttcgagaagagagcttagtgtctgtgtgcacgtgtgtttgtgtgtatgtgtgtgcgtgtgtgcactggcaggagtcccctgctggggcaggagggccgggccatcaccatctttcaccattcacccctgcaccaggcattgcagccatgatgctgtctgccgagccggagctcaccctggccgagttgaggcagagactgatccacttctctgccaaagatgtcatcaatgaggcctggttccctgaggaccagcgggtactgacccccaacctggtggccgccctgccccccagcacccatggggcaggtaagcaggatggcagggtgggcaagtccaggctggggcttgggaggtctgtgtgaccttgacagtctctcccttctcccttgtctgtgtaaggaggatgatgccaccttaaataggattaaatgagaatggggctctgaaagggctgtgcaatattttcataacgtgtttttatagagacagttgagtatgttctttaagccctcctctctcctaccatgaactaaagatttttgtggaggtcccctcactcccagcaccccctcctcatcccaggccctttttgcaggttggcagctgttttgcaggactgtgtggtcagcacactcggggcctacacggatggccacagccatcgcccgctgcgccccagatgaggagctgctgagctgctccagtttctccaggagtgggaagcggcggggcgagcgcatggaggtgactgtacccctccttcgtgtgtgtgtgtgtgtgtgtgtgtgtgtgtgtgcgtgtcagtgctgggccctcagggacccccagcaagcccctccatcctccagactccagctcttctgtaagcttacagggctggccagaccaggagtggggcactcctcacttcacgcggctgggggctgctggagagagccacagcgggaagggtttcctagaggctgcaggacagtgctggatggattttcaatgctcacctgggtgtgagcatgcggcagggccgcgtgagggtcagcgatctgctactctggactcagccatctctaggcccctctcactcaggtgctccatggttctgggagctgagaaatctcaaaccagcaaaaaagtggaattgatgttgatgctacaggatagtgcacagatgccatctggttgcagcattttggtggaagggcagtgcccagctaggagagtgaggaggggcaggcatttctggcttgaggagatagggtcttaatgctcgtgtgagaggcagagtgggtggagtggagctggctggatccttgctttggcctcctggatttctctctatctccattttgaaaccactctgtgtttggaagaacttttgagtattcagagctgcccactggcagaacagtcttccttgggcaggagtgagctccttgtccccagaaggctgggtctggctggcccctggcagggacactgatgagggtgcttgagttgatcctgtctagtccctttctgtgttttcaaagcccattctaaagcagattcccatttccgtctttgactctaaggcccaagggggcaagctggtctgccgggcccacaacgcttttgggggtgagggtgtctacgccattgccaggtgctgcctgctaccccaggccaactgcagcgtccacacagctccaccagctgaggccagcatggggacccgtgtccactgccaccaacagggccacgtcctcacaggtaggaggctgggcttgccctggggtgaggaggggtctctttctccttatgcacccactgcccacgaggcttggtcctcacaagtgtgatccatgagactcaagcctgacttgcagttccatactctggttctgccacttccatgccctttgagcctgggcaggtgaccttacttctcctcatctcagcttcctcctccataagagggaaaaaggtattacctgcctcattgtgttgcaaggagatgggcagcatctagggcactggcctggagtatcgcaggtgctttgcctaaggtggtgcagtccaggagaggcagctccagagagaggcccccggctggggctgaaaggagggcagacctcggtttgaatttcaccctgccgctcgatagctgtgtgacttgggcaaattacttaacatctctgtatgaggaaatgatgagtgctaagcacttagcttagtgccgggacaatataaattctagctatcgttactattgttttcatcacccgttgctttaaaatccagtctctggtataggcaactattgacgggctaccctgtgtcgaaaacatgcccaggcaggtagcaggaagtcacagatggggacctcttggggcatcaagggatggtgccctgaggctgagctgttctggttgggtggagcatgagaggtctgggaagacagtgggactccagcctggaataagaggctcagagttgattctcgtctgagcacgtccaggggaaccactgagggtttgggaacaggagagtgagggtgagaacctggttctgggcacagcaggctggcatgtaggatggatgttcaggaaagatgagcatagtcaggtggctggtgcccttgtccaggggagaggctccgtcaggttcaggggtcctggcttggagggaagtccgccatgctctaatcacgctcccctttggaagtgctcggccgatgagctcacaggcacatgtcagtttgaagtcatggaatctgactccatgaagcgcacctcaaagagcaccattttgcagctaagggaactgcaggctggacatgctgagtggctgccccgagcccttgcagctaggacatagagaatgctagtaaccacaaccctaccatgttcagagcacatgccaggctccatgctggggcttcgcacgtgtcatcttcacagtgtccctgtgagtaggtgtggtttctctttccatcttacaaatgagtaaacagagcctcagtgtagctaagtaaccactattttaggtttcttagccaatgggtgtgtctgactcctaagcccatggagggcattctgaggtggttcagacagaccccagcttacccttgaacttctgcctgctggctgcatagggaggggctggggggagtttgagcatctcaggccatagagcccctgcctcactgtctccatctctgggtggaaagatggtgttttccctgagaaactaaggctcagagaggttgaatggctctcccaaggtcacacagctggtcagctgcagagttgagaacacaggagtcctggtgctcaggccagcatctctttttttctttgagttgtttctaggtttcctagctcttgcctcagaccttaaagagagagggtctgatggggatgggcactggagacggagcatcccagcatttcacatctgagctggctttcctctgccccaggctgcagctcccactgggaggtggaggaccttggcacccacaagccgcctgtgctgaggccacgaggtcagcccaaccagtgcgtgggccacagggaggccagcatccacgcttcctgctgccatgccccaggtctggaatgcaaagtcaaggagcatggaatcccggcccctcaggagcaggtgaagaggcccgtgaggccgggtgggtggggtgctgcgtgtctctcctgcacagcttttctgtgtcagtttgtgccaccaccataccgccatacatcagggtggcggtttgccaggtagatgctgtgggcagcttccgccattgtgtggacagcatgtatatgtgtctctgtgtggctgggtctgtttttgcttttgtccagatcagtaaggtttgctacctgggtaccccactccacttggagtagagtgtgcataaatatggcataaagaaatgcaatatgcatgcatttattgattgatctatttttttctgagatggggtcttgctgtgttgcccaggctggtctcaaattcctgggctcaagcaatcctctggtctcagcctccccaagtgttgggattataggcatgagccgctgcacctggcctctctgatctatttaacaaacctgctgggagggtctcagggtcaggagcagcactgggctctgaggacacagagctcactcagccgtgacccagagggggtgcctgagctgcatgctgaaggttgttagcatgaccagcaaggcaagaaaaggccctgccgagattagcaaggcatgtgccaagccctggaatgtgacagccgggccttctagaaacctgagtgtataactctccttaaaagccagtaggagctccttaaaaggcagccctaaggagtccactcttaaatgaactcagagtcagttttaaaatgcaagtctgtgttgattctggtctggatggtgcattcctcgagagcaaaagacagtcttggtcttggatccacttgccctgggtacactgagggctgctaggttccaggtgctcttcctggcactggggagggatacaggcccaagagacatgctgttctccctcctggagcatctattttagtggaggaagacagaaaacaaaccattaatatagagtactgaaaagatgcgatggagaaaactatagcaaggaagggaatggggtgggagagaggtcaggagaggtctcgctgacaaggtggacgaaacaggccatgaggcagagaacatgttccaggcaaagcaaaggcccccaggtggggatgtgcagggagtaccaggaaaccagagaggtgggaatagttatgagatggggggtgcctcagaggggacagggccaagtcaggtgagacctgagggccacagtcagcagtgagctggggccatgcaggggtctggcctcagaggagtgtggtctggcctggatctgaacctctcactgtggcctagctgctgagctgagaagagatgacaaggaccttgggcagaagcagggagactggagggaggcggtggagggtccaggcgttggggcggggctcaggctggagtctgaagggagcctgcaggcctggtgggtggatgtgggtgggagagggggaggatggcaccaaggctcgggcccctggacagatggagttgccattaagtgggatggggcaggctatggggccatcagtttcagagggatgagtttggcactggcatggtaggcatctgtctatctccacggccctcaaaccaggcatgaagcaggagctcacgtgtttggtcagccatggtgcagaaccgcctgggtgggaggtgcggggtgggagatacacggttgtgtcccaaatgggctctgagccagcgagggccgtctgcactttggcctcacagaaggatgtcggagggagaaatgaagtgtgggtgggggtcccgggccacgctagacatgtgctttcttttcctcgggctctggcaggtgaccgtggcctgcgaggagggctggaccctgactggctgcagtgccctccctgggacctcccacgtcctgggggcctacgccgtagacaacacgtgtgtagtcaggagccgggacgtcagcactacaggcagcaccagcgaagaggccgtgacagccgttgccatctgctgccggagccggcacctggcgcaggcctcccaggagctccagtgacagccccatcccaggatgggtgtctggggagggtcaagggctggggctgagctttaaaatggttccgacttgtccctctctcagccctccatggcctggcacgaggggatggggatgcttccgcctttccggggctgctggcctggcccttgagtggggcagcctccttgcctggaactcactcactctgggtgcctcctccccaggtggaggtgccaggaagctccctccctcactgtggggcatttcaccattcaaacaggtcgagctgtgctcgggtgctgccagctgctcccaatgtgccgatgtccgtgggcagaatgacttttattgagctcttgttccgtgccaggcattcaatcctcaggtctccaccaaggaggcaggattcttcccatggataggggagggggcggtaggggctgcagggacaaacatcgttggggggtgagtgtgaaaggtgctgatggccctcatctccagctaactgtggagaagcccctgggggctccctgattaatggaggcttagctttctggatggcatctagccagaggctggagacaggtgtgcccctggtggtcacaggctgtgccttggtttcctgagccacctttactctgctctatgccaggctgtgctagcaacacccaaaggtggcctgcggggagccatcacctaggactgactcggcagtgtgcagtggtgcatgcactgtctcagccaacccgctccactacccggcagggtacacattcgcacccctacttcacagaggaagaaacctggaaccagagggggcgtgcctgccaagctcacacagcaggaactgagccagaaacgcagattgggctggctctgaagccaagcctcttcttacttcacccggctgggctcctcatttttacgggtaacagtgaggctgggaaggggaacacagaccaggaagctcggtgagtgatggcagaacgatgcctgcaggcatggaactttttccgttatcacccaggcctgattcactggcctggcggagatgcttctaaggcatggtcgggggagagggccaacaactgtccctccttgagcaccagccccacccaagcaagcagacatttatcttttgggtctgtcctctctgttgcctttttacagccaacttttctagacctgttttgcttttgtaacttgaagatatttattctgggttttgtagcatttttattaatatggtgactttttaaaataaaaacaaacaaacgttgtcctaa

SEQ ID NO: 1963 - DNA, 6501 bp, Homo sapiens
tctgtttttgaaaaatttattttatactcttagaagctaagaactttgccacacatgaaccaaatttagaattaaggttcttccctagtgtatctacttccttttgaaattttataaacaagattttatacacaagaggtagcagaggaaaattccagtctgcttgttccaagctcagaaggtaactgcacacacctcgatgttagcagggaaggtggggcaggacagggtaagtctgatgatacggcactctagttcctaaaactgactgtagttgtcagtgaccgtgtgaggactccaggagaagtcgtggtgagatgcccgctgggatgcttgttttctttcccaggatgccttcaacgggcagaatcggccatcttaagatcggcctcactaagggagcttcttgagaacacacagcattattgagttaattgtgcaattcctgctctgtttgcagaccattttgaaaggtttataaaaacatcttcatccaaaaaattggcagtaaaaatgacaactcttccaaggtaagcctgtcataactgtcactgttgtactacattaaaaaaagtcatcagcaggttcattgactgtagctgtcagcaatcaagtggttaccagcaaagtgaaaacgatggtcattgcagcaacaatataagcaacatgatctgaagcgtataatatacacggtggacgatcctgatgaacctttacagtgaggacggcaggtgctaggggtgcggaaggcgttgtttccataggaaataaggggactagaagtggcaatttcactcctgattttgggctcctgagagtgcagtcgccagcgatgatatcccagtgtggatcatcgccagcatttcaaggtcatgtcccacacaatctcttggtgaggatgtgggcggagagaaggtgagaatagggtaggggaaacagtaggacaggaagtattcacgtactcaaaaccaatggtagaacatcacatttcaaactgcaagaccattggaaccgtctgaagtttgccactcgcctctgtccgtttctctaagggtacagttctgctcttaagtgctggcccttccatcttctcagtgtgtttgacaaaggccactgccaacctccagcaagtcacagaataacaatgaagtctgacagcacagaaaccctcactgccagagaatgaaaagactgggccatggcgagagcacagtaatgagatgccatctgcctggccacatgcccacacaatgccacagcagccagacaggcacttcagggctggctgcgcctctgtgacttggcaaatctgacagtgaaaacctggcacttcctaggctccctagttctgtgcatggtgagatgaaaataaggcaggacctgtaactaaaggcaaaacagggccgaaaatgtgagcaattcaaaatacaaaatgtacaaaatatatatgaaatatgtgggtgtaaacctctcccccacaccataaaagggagctggtataaatgagtgaatggtgctatactttggaaatacgactaaatggatggttattcaattgctttatatttatttctgggaaaataaatcttaaaccttgactgacttttcagtgttaattagtcatgttgaggagaaacaaattctcaaattccttctctgcattacaataactatgaaactcacaagcagtgtgtaccaactcaaatagttaacttcatatacaaccaataccaagggtttcagtaattatgttttaagcaaaagcaaacgattgcagatcacatgatttaagactacagtttattcaatatgtctccaagcattaaaaagataattctgtgaagttaaactcagtaaaattatatcttaaagtgcttttattttgctgtttttaaaatctgtttggggaacaactcataacttctttaagtaattgatgtcaaataatgcaccctgtacttctggagaacacagcattttcaaaattgctcttttcaatctaattatatcagaaaaatatcttcaagagcttagtatttcccaatttttgatcctgatcctggtaacctttcatcaagatccaagcttatgcatagggttctcatctagacccatctgaaattctatacaaatagggagacatattaaatacaaaggtctgtgtaaattgacttaattactattttacaatgaaaaggaattttattacatctttacatcattttaaattggatattcctgtttaatattactgcaagattaaaaatttgcccccacatatctaaaagcagcttgctttttcttaaaatataaaaaccaaaggaatttcttttgtagcatcgtagagaaagcaacagctttatgctcactcttgtatgttcgtgtaacaaaaaagtctgccactggctctatttccgaaaatctccacagaaatgtgaatccacatatagaccacgctcccgggacagctgatccacatgccggagttctcccactgccaaacagctcccaaaccttctagtggcttaaaaatgctttccttgagaaatacacgatccgcccaagtcacagcagctttcccagtccaatctccaggctcttccaaagggttcgagattctgattccaagaaggtgctgagcatccagtattgtgtcttgactcctctcaggctgggcatgttcctctagggatcaacatcatcaaggtcacttctcaactcaccaatcatcatgggagattctgaaccctgcagaaaagaaaaggaagttaaagttcatacggttagagaaaaggttttctatgctgacttgtgttctgcaatttaaacatgtcttcatctggcaacttaatgcaatgtttatcaaagggtaataaaatgtgataactattacatctaatatttgacaattcatgattatgtaaaacatgtacatttctatgatctcatttagtcagtgaaacaacccagcgacttgtctaaagtcacaatgctactctgcacccatgtgagaacgcagagcagtgataaagctgggagaggcattgatggccattgtgcccgcttcacgttgggcactgtgtgagcctccctgccctgcacctgccaaatatgggctctgggtcactcctgggtctgaaggctacctctgttaccatctgtgtggcctttggcttacacacttggcgaatcgttctgaatactcaccgtgtgccatggggctgatctagttggagctggggtggggaggagcaaggacagtctctctaaagtgacaacctaagctgagtgagagttgggggtgagtaggggggccctgaggtggaaggaagagagtacatttgataaataaaattcagaaaatgggccaggcacagtcgcttatgcctgtaatcccagctacttgggaggctgaggcaaggagaatcgctggaacctgggagaaggaggtagcagtgaggtgagattgcaccactgcactccagcctgggtgacagagcaacactccatctcaaaaaaaaaaaaaaaaaaaaaaaaaaatcagaaaatgggggtggggaggtgcgcaggtgctagatcaagcaggactgtgttgaggattctggcttttctcctcatacaaagcctttgaaaggttttagtgcatgaaccagagagaagcaggggtggaggtgaggggatccttacagacgtaggcagagaggggctgatgacaggtggaggagagggacgagcaccctttcaaagggagctgtccgggatgacatgggggtgctgtgtgtgagataaggaacactgacggagggccagctttggtgggcgcagggaggaggggctgggcacatcgagtctgaggtctttaaggtatgccaagtggagaacgtcaagaacaagagagctggatgttcatgttcagaaatccaaggtgggtgcggagagaatatggagtgagggcaggaggatacaggttagagactccacaaacctttactggtggtccagaagaggcagtactaggaaggagacagagaaggaacagccagaagggtttgaggaaaactacgagagagaagtgtcaggaaagccctggaatagtgtttcaaacgggaagagcgccaggagcgctagatgctgccgagcagtcggctaagatgaggcctgaaagctgcaggccacctgtcaccccaactgctgagttggagagaagagggagttagcagggaagaggctgaagagcgagtgagagataagaaaatggggaaagttaagtttagagaattagtcgaagtttggctgcaaagaagagaaaagaaggcaggggcaacagggagaagagaggctttgacagggcagaagagaggctttgacagggcagaagagaaaccagtgtgctgagacgtcgctgggaagggtctggcagggtggagcgttctggatattgaagagttacatacacattagaacgcaaagctctgccaaggtgggcggggatgagcgctaggggctttgggtggacagaggcaaacttcccactgtcacaggagaggagacaagaacagtgcagatgcttgggaattagtggccgcaggagctctcctgtgacagcttttattttctctgcaaatgaagtaggtgatgaggtaatgtgtggagtgaccttgggctaagtcacatcactgtgctgggctgcagttacctttctgtaaaatcagggtgacagctgcctcacatagtgcttatgaggatccgaaagataacacttaaaaaaaaatgacacctactacatcagtaacattcatttaatggggcctattctgtaccaagtactgtgaagggaccacagaggagactgctgttaaggaaagttacagactattggaaagacgtaatgattaactgacacttagttcagtgtttgcacacagtgggtgttcaatacatatttattttctttttctactataatgattggtattaaagctgtttttttttctttttttaaaaatacatgtcaaaattttcttggactcccctggcaagcaggtatacttcaagagcacgggagcttttctttcaagagtccacatttccaggaaggctggtgagagcaaacgagggactttcagtaacctggcaaggcagaataaagtgaacaagctggaacgaatccccctgtgccctggcttcatcgggactacctgcaggctgatcagggtggccagccacaaacacctcgaggccttccattcacttcacactgcagcactactcagccctgtaaacacacggttagtgcatatgctgagctgagatcactagagggcagcgctggtaactctttggactcacattccagaggaagcatcttgttttccctcagctgtggaaattctttttggaaagcttaagagcaaggctgccctttgcacacaaggacatgctgaccgttatacctgctgtagatgcctgtctccgttctcattggcaggactactctccgacccattactgcttcctgattgctctttttcattcaacaaagctgtggcatacgctaacgtgtcctgcagaagattcaaacacaagacgacaaagttagggcccattcagtggcagcagcaaccgccagggaagactacctttcatctgaccttcagtgggaccggaggcctgagagtgaggccttcatcacagtcaccagaaccccctcaacccctgtccctttttgtgaccagactgcccaacctgtatgactttccttctagacaaataatctgcacaaatttgtgtaagtgtacaccaatctgttttcttttcatagaaatccaattgtttcttctgcttgttctcatcttcaactcatacctctcttctcagaggttgcagtttctgagaaacacactgaaaatcctccataagtgatttagaccacgcaaaaacaagagacaactctcacctgagctgaaatggttcgctgaaaggtttttccagttgatgtttcattagagacattactctgtggtgtccagtaatgttctgacatctgagatgaaaggtcaaaaatgccatcagaggtgacaaataagcccccatgggttcacagtttctaccattagatattgagtcttaaaagcatcccaagtagggtacaagtctacccagaccttccatcacataaagcgattcaagacctcagtcaagtattgcttcttatatcatcatccctaccttttcccctatgaagttaagacatatgtattaggacaaatttaatgcacacaagatataaactgtagcaaagaaatgtttgaaatctgaaaacactttaaggtcagtctccatattcagttccagagatttttcctgacaagatgtgctattattgattcctatgttacagctagaaaaattcaatgttcagttaccttcttctgtagccactgcacagcccagctccagtggtgggaattctccttgaagtactccttagctgcaggacac

SEQ ID NO: 1964 - DNA, 3968 bp, Homo sapiens
gcagtgaacactctttgctaaatttctgactgaatccaagatttttccttagaatagattcttaaaagtgggggccaggtgcggtggctcacacctataatcccagcaccttgggaggccgaggtggccagatcattgaggtcaggagtttgaaaccagcctggccaacatggtgaaaccccgtctctactaaaaatacaaaaattagccaggtgtgtggggcgtgcgcctgtagtcccagctacttgggaggctgaggcaggagaatcgcttgaacctgggaagcagaggttgcagtgggccgggatcacaccactgcactccagcctgggtgacagcaagactccatctaagaaaacaaaaaaaaaaagtacgattggtgcgccagagtgaacacaaaatgtaaagacttgtgtatttgtgagacccttttgaagcatgctatctccccagctacaccctcttcaggtgccccttccctgcctcctcctgcttttcacactgtggctcgtggttccaggctcaagcacggacatcagtgaggactgggagaaagactttgacttggacatgactgaagaggaggtgcagatggcactttccaaagtggatgcctccggggaggtgagtgggcctggtgggtcagagggaagcgagcctaatggtcctgggtgtgagagctctccccagccagcccagctgtcccctcaggagggtccctgctcctgtctgaggtgacaggtggtgggaaaggagctggagcttcctgctcagacccacaacattggtcatcagcaggctgcacttttcctcagttccagggtggatagagggtcaagttcttgaccttagctctgtatcaaaattgcctgagaaactgcttaagaaaacagatgtcatgctgagcgcggtggctcacacctgtaatcccaacactttgggaggccaaggtgggaggattgcttgaggcgaggagttcaagaccagcctggccaatatagtgagaccccatttctgtttttgaaaaaaaaaaaaaaaggaaaaaagaaaacagacatcaaaccctgcctgaccttctgagttgtggtcctcaggtatgaggcctgagtatatacttggccttggagacaaaagaccagtgtgatcaagggcaagggcaagttacttaacctgagcccctggttcctcatctaaaacatggaattgatcattataagacctggctataagctgtaatgaggtgatccatgtagacaccttagggctattgcctgagacatggtgaccagcactcaggagacattagtgataaaccccacaaaacccattccagttattaagctcaaggaggccttagtactgttattcttcactacctctcagaatcaaaagtggctcatttagattgagaggctggaacagtccaaagctctcccagctaataagtgacaggactgaggctgcaacccagacatctgattcatgtcagcgttagttccactgtcacataagaaccacatgagtccttccatcatgtaacttatgagcctgttagaaagaggtggacagattagagagacatgtgaagggcctcctttttcatgatgggaaactgaagccttgggggagtattttacctactcaggagtattttgcacttgtgactacctcactatacccaggacagagaaagcccatagtgccctgtcaggccacaggggcttgctggctttttgtgtctttgcagccccctttaaaacctgacgtgcagtacacgtgagcattctagaacctgctataccagggcttagccgacagcaggccaagagtaggaacaaagcaagaaaacgttccgtggggagacttgagctgggaattagggtgttggtgcccctagtgaagacctagtgggcatctgtaggccactgccacctctgcttttggccacagtgccactcaggcagtggcctccattcacccaaagactaagtaacttgcccttgattacactggtcttttgtgtccagggccaagtatctgctcaggcctcctgagttctctgcttctcagagccatggcattatctgctcagcaggaggcaagttctccttaaaggactgaggctgacttggttcctgtaggcagccatcaccttgtggtgtctggtgttggttgggggaagtgtttcctttaggtctgaggtaatcagagcatcaggcccacccctcaggcagagggcagctctgcccctcagacacattccttaagactaggggttcactctcagtgggacctcagagtatggcctggggtaggggatgggaggtggctctgctcagcaagtggaggttaggtctgggcctgactcaggagtaactatgtgtttgtgatttccattaccccctcccatttgcagctggaagatgtagagtgggaggactgggagtgagggagccagagggagcagctcccccacccatggcatctctcgcctccctcgctcgtctcagcccagccctggaagactgagaatgttcccccaaatctcctctgccaaccagagctctgggcacagattctggtggctccctgctggccctcttgggcctctgctcacacctgggaaggggctctctaaatcccggccagaaactctgacttgtgccaacaataggatgacccaagggagaggaaacctatcctcctcaccagaagagcctgtgtttttctgctgaacacccactgttcctgaggactcctgctgggaagtcccaagggatagttctagcccttctgcctgtgtagacagaagctaaaccaccagtctctctcggaggaagctgagacaacatactctgtccatacataagcaggcagggagggccatgccacctacccttggctaaacagggacagtgaacacattttggttcctatcccagtgggtaagaggcacttatctctgggaaatttgcctctcttgggactctccccctcccaggcattttccattcctggaaaggctcctttggggttcagaatccagagaccaaaccctgacccacctccttcctttcctccagcccacgctggtctgtccccatgccttcccagggcttcttcatgtcagatgcacccaagtccttagcccagctgtgccacctgcaggagttcgctcttgcgtttcttcccctccccaagaagggagggggctacttcaggcccttctgtgtgttgcctggcaggataccttgtccaaccagctacccacctcaactcccctgtagtttaggacacaaaacagctaccagcggtacagagcggtgatcaaagccgagtacttacaactctggtaagcctagcttctccgcctcagcccttctgcttctggaagggctatcctgggggtgaacttgaaactctcatcaggcttctgcaaaagctcttcttcctgaagacagacccagcctttgtgctctcaccctccactctggtaaagctgcacctctgggggaatgaggggctgcaggaatctctggagagcctggtgcttcacgatgctgctctggtgattcttgtacctaatctggtgtgctcaccaatgagtgaaagggatcgtgggtcagggacaccgagagagtgaggtcacttccacttcaaaccttcagtgagggggtgggatggagagaatgctgaatcttttttttgacgggatggggtttttctctttgtaattatttctttagtttaattaaccttttggttgtttgtgcaatattatatattttaaattataatgcatctccccagagtattttgtagctgggaaaagaaaaaaggaaaaaaagaaaaaaagattctaacagctgttagttttataattaaaaaagaaagaaaaaagaactttgtcctgaaccttttacagacttgccgttaacagcattaaagtgattcacccgaagctgaaa

SEQ ID NO: 1965 - DNA, 3968 bp, Homo sapiens
gcagtgaacactctttgctaaatttctgactgaatccaagatttttccttagaatagattcttaaaagtgggggccaggtgcggtggctcacacctataatcccagcaccttgggaggccgaggtggccagatcattgaggtcaggagtttgaaaccagcctggccaacatggtgaaaccccgtctctactaaaaatacaaaaattagccaggtgtgtggggcgtgcgcctgtagtcccagctacttgggaggctgaggcaggagaatcgcttgaacctgggaagcagaggttgcagtgggccgggatcacaccactgcactccagcctgggtgacagcaagactccatctaagaaaacaaaaaaaaaaagtacgattggtgcgccagagtgaacacaaaatgtaaagacttgtgtatttgtgagacccttttgaagcatgctatctccccagctacaccctcttcaggtgccccttccctgcctcctcctgcttttcacactgtggctcgtggttccaggctcaagcacggacatcagtgaggactgggagaaagactttgacttggacatgactgaagaggaggtgcagatggcactttccaaagtggatgcctccggggaggtgagtgggcctggtgggtcagagggaagcgagcctaatggtcctgggtgtgagagctctccccagccagcccagctgtcccctcaggagggtccctgctcctgtctgaggtgacaggtggtgggaaaggagctggagcttcctgctcagacccacaacattggtcatcagcaggctgcacttttcctcagttccagggtggatagagggtcaagttcttgaccttagctctgtatcaaaattgcctgagaaactgcttaagaaaacagatgtcatgctgagcgcggtggctcacacctgtaatcccaacactttgggaggccaaggtgggaggattgcttgaggcgaggagttcaagaccagcctggccaatatagtgagaccccatttctgtttttgaaaaaaaaaaaaaaaggaaaaaagaaaacagacatcaaaccctgcctgaccttctgagttgtggtcctcaggtatgaggcctgagtatatacttggccttggagacaaaagaccagtgtgatcaagggcaagggcaagttacttaacctgagcccctggttcctcatctaaaacatggaattgatcattataagacctggctataagctgtaatgaggtgatccatgtagacaccttagggctattgcctgagacatggtgaccagcactcaggagacattagtgataaaccccacaaaacccattccagttattaagctcaaggaggccttagtactgttattcttcactacctctcagaatcaaaagtggctcatttagattgagaggctggaacagtccaaagctctcccagctaataagtgacaggactgaggctgcaacccagacatctgattcatgtcagcgttagttccactgtcacataagaaccacatgagtccttccatcatgtaacttatgagcctgttagaaagaggtggacagattagagagacatgtgaagggcctcctttttcatgatgggaaactgaagccttgggggagtattttacctactcaggagtattttgcacttgtgactacctcactatacccaggacagagaaagcccatagtgccctgtcaggccacaggggcttgctggctttttgtgtctttgcagccccctttaaaacctgacgtgcagtacacgtgagcattctagaacctgctataccagggcttagccgacagcaggccaagagtaggaacaaagcaagaaaacgttccgtggggagacttgagctgggaattagggtgttggtgcccctagtgaagacctagtgggcatctgtaggccactgccacctctgcttttggccacagtgccactcaggcagtggcctccattcacccaaagactaagtaacttgcccttgattacactggtcttttgtgtccagggccaagtatctgctcaggcctcctgagttctctgcttctcagagccatggcattatctgctcagcaggaggcaagttctccttaaaggactgaggctgacttggttcctgtaggcagccatcaccttgtggtgtctggtgttggttgggggaagtgtttcctttaggtctgaggtaatcagagcatcaggcccacccctcaggcagagggcagctctgcccctcagacacattccttaagactaggggttcactctcagtgggacctcagagtatggcctggggtaggggatgggaggtggctctgctcagcaagtggaggttaggtctgggcctgactcaggagtaactatgtgtttgtgatttccattaccccctcccatttgcagctggaagatgtagagtgggaggactgggagtgagggagccagagggagcagctcccccacccatggcatctctcgcctccctcgctcgtctcagcccagccctggaagactgagaatgttcccccaaatctcctctgccaaccagagctctgggcacagattctggtggctccctgctggccctcttgggcctctgctcacacctgggaaggggctctctaaatcccggccagaaactctgacttgtgccaacaataggatgacccaagggagaggaaacctatcctcctcaccagaagagcctgtgtttttctgctgaacacccactgttcctgaggactcctgctgggaagtcccaagggatagttctagcccttctgcctgtgtagacagaagctaaaccaccagtctctctcggaggaagctgagacaacatactctgtccatacataagcaggcagggagggccatgccacctacccttggctaaacagggacagtgaacacattttggttcctatcccagtgggtaagaggcacttatctctgggaaatttgcctctcttgggactctccccctcccaggcattttccattcctggaaaggctcctttggggttcagaatccagagaccaaaccctgacccacctccttcctttcctccagcccacgctggtctgtccccatgccttcccagggcttcttcatgtcggatgcacccaagtccttagcccagctgtgccacctgcaggagttcgctcttgcgtttcttcccctccccaagaagggagggggctacttcaggcccttctgtgtgttgcctggcaggataccttgtccaaccagctacccacctcaactcccctgtagtttaggacacaaaacagctaccagcggtacagagcggtgatcaaagccgagtacttacaactctggtaagcctagcttctccgcctcagcccttctgcttctggaagggctatcctgggggtgaacttgaaactctcatcaggcttctgcaaaagctcttcttcctgaagacagacccagcctttgtgctctcaccctccactctggtaaagctgcacctctgggggaatgaggggctgcaggaatctctggagagcctggtgcttcacgatgctgctctggtgattcttgtacctaatctggtgtgctcaccaatgagtgaaagggatcgtgggtcagggacaccgagagagtgaggtcacttccacttcaaaccttcagtgagggggtgggatggagagaatgctgaatcttttttttgacgggatggggtttttctctttgtaattatttctttagtttaattaaccttttggttgtttgtgcaatattatatattttaaattataatgcatctccccagagtattttgtagctgggaaaagaaaaaaggaaaaaaagaaaaaaagattctaacagctgttagttttataattaaaaaagaaagaaaaaagaactttgtcctgaaccttttacagacttgccgttaacagcattaaagtgattcacccgaagctgaaa

SEQ ID NO: 1966 - DNA, 3968 bp, Homo sapiens; identical to SEQ ID NO: 1964

SEQ ID NO: 1967 - DNA, 506 bp, Homo sapiens
gccagggcaggactggcttcccacttggagccagagacagggtagggggatagcctaggtccagaggacgtaccttgtcctcatcccagattcagctttgcctttgggatgagaaagggtcagggctcgcaacaggcctctcactgggacaaggagtcgggaggccatctctgcactcccagtgcctctgctttcctttggaaaggaagttgcaacaagaatggcttcagttgctcttggtcatttttatcctctcttccccctgtttgtatatgattcttgggtctattttaattaactttagtatgaaaatcacttgtcatgccaggcgcagtggctcatgcctgtaatcccaacattttgggaggccaaggtgggtggatcactaaggtcaggagttccagaccagcctggccaacatggtgaaaccccatctctactaaaaatacagaaatagccaggcgtggtgggaggtgcctgtaatcccagctactggggaggctgag

SEQ ID NO: 1968 - DNA, 506 bp, Homo sapiens; identical to SEQ ID NO: 1967

SEQ ID NO: 1969 - DNA, 456 bp, Homo sapiens
  misc_feature (76)..(76): n equals a,t,g, or c
ggtgcctgtaatcccagctactcagggagggctgaggcaagagaatctcttgaacccaggaggccggaggttgcanggagctgaaaatcgtgccactgcactccagcctgggtgacagagcgagactctgtctcagaaaaaaaagaacaactagagcagagtgagggtgatgatgggttgctctttaaactaggatggtcagtgtaggccacatctagaaggtacgatttgagcaatggcatgaaggaggtgaaaagttggtcttgtagatatctgaggatacgagttccaggtgcagggaacagcccatgcaaaagccctaagttgggaatgcgcctggtatgtttctggaggaacaagattagtgtgggcagaatggagtgaggaagaagaggtctactgtttgggggtccgaggggaggtttttgttttctttagagacagggttttgcactg

SEQ ID NO: 1970 - DNA, 479 bp, Homo sapiens
aaaattagctggatgtggtaccaggcaggtgcctgtaatcccagctactcaggaggctgaggcaagagaatctcttgaacccaggaggcggaggttgcagggagctgagatcgtgccactgcactccagcctgggtgacagagcgagactctgtctcagaaaaaaaagaacaactagagcagagtgagggtgatgatgggttgctctttaaactaggatggtcagtgtaggccacatctagaaggtacgatttgagcaatggcatgaaggaggtgaaaagttggtcttgtagatatctgaggatacgagttccaggtgcagggaacagcccatgcaaaagccctaagttgggaatgcgcctggtatgtttctggaggaacaagattagtgtgggcagaatggagtgaggaagaagaggtctactgtttgggggtccgaggggaggtttttgttttctttagagacagggttttgcactg

SEQ ID NO: 1971 - DNA, 506 bp, Homo sapiens; identical to SEQ ID NO: 1967

SEQ ID NO: 1972 - DNA, 1006 bp, Homo sapiens
caaaaggggcttctattgtattggtcatattttattttggtttaaaaaattttagagtaaatgtggcaaaatgttaatgcttgttaaatctgagtggagagtacattggtgttaagtgtgctgctatgcagggtgagtgaattactcaataactaaataattgtgacataatatatttatttatgcttccctgttatgatctacacataaaattactggagcattattgcttaacttcttgtaaaaaagttctgcaattgtagtgttattaagaaagtaatattgatttgtatagtgacagaggattttttcagtgtcactttgccagcagagatcttcatggtgggcattgcccctgcccatgtctcacttggccctgggcttgccccactaggtaccctgcccacctggccaggcaggctgtgcttggcttgagctctggcccagatcctgcacttgctctgcggctgagccaggcatgccatgacctacttccaccttgggagccggcgtctggatgaggggaatgctgtgacacttgaacagaggtgggcatgtgaccccaaagccccaaagggggtgttacagcatgctaacagttctttcagtctcacatccacagcccaacaaatggaggtgtgtggtgcccagaggtcccttctcccattgtttggcaagcaggaggggtgtgctacagggttacagctttgtttgcacttgccgtttggtgggtcctgagttcttttcccatgtccaagaataaggttgtgctgacagctagcggttgagtgaggcaaagagttttactcagtaacaaaacagctctcagcagagaaggaagcctgagttggacagcacccttacctgaagttgggtagtcttcccaccacctaaaagtgggtagcccaaagtgtggctgagcctggggcttttatatgctcagaatgggagtgtatgtgctaattggtttgtgagtatgcaaaaaaagctaaaaaaaaaaaaaaaa

SEQ ID NO: 1973 - DNA, 336 bp, Homo sapiens
gaatgtaagctaattaaatggcttattaaaggagattttcagatatttttgaaaatctatcttgatagtacttataagagataaatataaaaacttaaagatattggccaaaggagattaaaaaaaagtcaggcaattaaccagaacaacattagtgatattaatagaagctagtaaaatacaagagagaacacaaaacagacccatccctgtatagaatttggtgatatatgacagagatgaccatacaatcaattagaaaagaaagcattgttgatggtcctgattgagtaactatgtggatgtggagggcagtgtaaatgaaagcctaacttc

SEQ ID NO: 1974 - DNA, 1583 bp, Homo sapiens
ggatctgtgtggcatggtatgtgtgtttatgtgtattgtgggtgtctgtgtggcatgctgtgcgtgtgtgtattgtggatgtttactgtcccgggcagtagaaaggacgtcggggaagcagccccagcatcagggacaggccaggagtgcagaatgcatggaagctggtcaggtcggagcccgggatgaaggaagcacagagatgcaagggtgccagggcccatggaaccaagagccgatgatcaaggccacagtgcacacagccctggaggcaaaggacatattcatttcacaaggattaaaaagcatgggccaaggctgggccccaggccaggactggggatacagagtggatcagtccccatccctgcccccaggtgcttacccacacccattcacctcacaggtttccccaccccagccccttggcgagctcctcctcattcctcaaaacgtcgctgaggtcacgctccttcccgaggcctctccccatcctctaaaacaccctctccctgctgcccacttgcagcacagtcagagagctccgtggcctgtttccactggactgagtcttctggggggtgctggtgcagagcagaaccctgggctgggagtcccggcacctcgttccactccctcacccacagcctcgctgtttaacctcaggcaggccgtgtccctcctcagcctcactttccccttgtgtaaaatgagggaagggactgcgccttctaagtcatctttcagcttaaaacctctttgaccttctatctggctaatggaggtgctgaccaggggcaagaagggatttgaaaaacgctttgaaaaattcatagcaggaggcaaaggagaaagagtctttattttcgtagagcgggaggcaggaggagttatggacagaggctgtcgatgaaaaggacagcatctcagagcactttgtggcatttaatgtctaatgcctcctcccattaaagcagtggcatcaaatatttaccaaagcagcattaaaaattaacctttaccatggggatgtataaaggccctaagttccctgagaagtgaccgaacatcaggagggtaaagtgacaggaaggaaggctacaagcgggttgtgaataatggaagcccccaaaggtcccccaacacagctccctgttgaccccactcccaaagccagggcagcctccggccgtgtctctgcagaggctcccagcccttcggagactcccagagggcctgcaggataaggacaggccctcagctgggcatccacagccttccatggcctggccctgcctctctgggcagctgggatctgtaggatggaaaggaatgagtctgtcggagttggaagagaccaggggaggaagtggggagtggtccgggcactggaaatagcacgtgcagaggcactgaggcagagacagctgcacatcaatccatcagaagagcagccaggtggcatgagtgtgggggaggaaggaagcgcaggaggggacaggtgggagatgcaggtaggtctgactgtgcagggccatggtaagatgtgggcttctcggtccagggacaggggtgccctcgag

SEQ ID NO: 1975 - DNA, 4443 bp, Homo sapiens
cagagattatctcatcattgactccgagttgattggatggatgcagacagtatacagaagagcctttagagcttcatacaattgtgagctgataatctttcttagaatcatccaattggatgcacagtcaacaagcagccttctggtagttcattcatttgttcattcattctctattgagccttcaagcaccttcagtgtgacagatgtcacactaggtgctagacacacaaagataaattatgtttgtgcactgcttggagcagctcattccctcctcagaggttttgttgcagggtggagaacaggatggccagctgacaggtattccaggccctgcagctatgattttctgcactgtgatttaacaaaataacgctaggtgcaatcagtcactctcttgtgaattgcttagcaaagattattaccccagacagagtacactgagaaaaaataataaaaccctaggactggaccccaaactgaagacttcagtgaggaattgcctctttgtgacattccaccctatatcgtaacactgatgattcactttggaacctaaaagttagttacttttatgttcaacctacactcagcaattctactgcaatttgtgtctctccgtgttggctacctcttatgatctgcaatgccacatactactatcttcaggctgcaggctgagcctaggaactgagtctcagccatgctttccttccatcacccctcccatccccagctggcagttagtgttttgcaaatgatactgcaaatgattgtagtttgtgtttatgagaaaagggggttggtaaggaaaagacagaaagaaaggggattggggaaggggagagagagagaaagagagagggaggggtttaagctacttggaatttggagtttaagttgcccttaagtaaagcatatttttaataggctactataagaaacacacttttcaagggaaaaaaagtgggtttgaattttggctgccactcattagcaatattatctttatagggtaattatcatctccgggccttgatttttctaaactgtaaaatgaaatgtttggagttagagaatttttaaatattctggtatcattgattcttgtatttcttgagacaaaatcctctctttcacattctgctaattttgtaatttgtttcaccattctctcttgacacataaaaggactctgtgaaaactatcagtatcggagaagatttcctataaccatcatatcatctatgtttcctattagggcttctgacattccacatgttttcaaaggtaattggaaatactggagacaatttaagggtcattattgtgttagccaagaaaatagctaatgatgactttagctactgggctattcagcctatcatagagcccattagctcaattaagtaaatcaaataggaaaaaacatttagacttaaaaagccacccaccactacctattacttgcctgtgaggcttctatttcatggtgaattcaaattgcttgttcattgtaggtagaagaaaatgagcaatcatctgattcagcagatgcagtgattcaagatcacttagcatttataatgataaaccaaaaattatgttaaatagcaattttaaggaagcaggtaagactagaagccttctgcataaatcaggcttgagctttgcggaagtggcttctttccctgtactgaggtgtgagaagcagcacatggatttttattcctttaaaggattttcttcaagcaacagtctgtagttcaggttaatgggaaggcaaggcagtagcattgggatgaacatttatgatcccaaacattctaattctaggtgtctacagcattcaaatattgagtaggcacttacacttccaaagaccaattcttcaagataatgctgaggttaacttacagttttatatattattcaatggggcagttcacaggacatttgaagtgacttggagagaaaaaagaataccgccgttcatattattaatatttatggtacagttattatattcaggccatgctattgctggagagagttggtccattgaataaatgtgcaatgttcatgaagcagtgaatatatcattcaattaaaaattcagcaactgatgtagtcagggatgtgctggtaaatgtctcacaactggctttccaggaccggtttgcagcatttgctgattttcatggtgtagacccttccctcatggctgacatcaagctaccaatgggttggcatctggcttgcacaactgctggaaatttagcaatcaactcgagcacgctggcacaagttgctccagccccagtaccggacatgacttaaagagtgagggggtggaaaattacagtcaaagggggtccactacctacccaaatcctataaaacggccccacccctatctccctgcgctgactcctttttcggactcagcccacctgcacccaggtgaaataaacagccttgttgctcacacacacacacacacacacacacacacacacacacacaaagagtaaggggtgaaatggctttgcttgtaactggattccaagagaatcattcttagaccgcacacctaagtgtttactttattaccaactatcatctcaaagtgggagagaggatggggattgggtccccttttcagaaaacccctatgaaagagccctttagaaaaaggctgggcttgaggaagtcttaattctaaatatcgcggatcaggggaaggagcaggtcattccatttccttgggactcacatgtataataagcagatttcatatctgagaggcgtaagttcccttctatttttgctgctcagtgtgcaatttagtccaaaaattgactccggtgcagatcattaaattgtcaacagccagtgggtcctgaaacataagcaaggactacccagacaggaggtcgggagtttctaatgcatccccggggacctgctaggatcttgacctctctctaagagaggctttggactgattcggcataacagtgggggcagatctgctttctccaaggctgtctcttcccttctatcagtgatctccaccttgctcagcccactcaatgctgcctttgctgttacagtctaagaaatgtggctcctttttcctaacctctcttctcctttcacctgcatgtcataaggtggtcatggatatattctttcatattcttgctaaaatactcattgctggaagtaacacaagggtatcaaatttgtataaacaacagtatgatttagttctctaatataataatgcaatataacaaaatgagtccattcaactgttgtccattcaactataccttaatatatattattttattgatgcttatctatgtatacattagttctgtgcacagtctagtggatagtgatctgttaaatggataaatgaatgaatggctgaagttttatccttctgaatggatgagtggcctctctagttcattttcaagcctctagggctatgatacatgtttcctatttccagatttttctttatgttctctctttatttctagaaaacacaaatagcttctcgcccatgggggggatttttggcaggaaaatcgcactctttacctgtcatccaccttccagaaatgcaggaactgaaagactgagaaagtggaaaacacgccatgcaattgctaacagttggcagagcagcaagtgcactccagtgggtggcatttgtccctgtttctatgctctgatctgaagcttgtacaacagatgtaccaggggctggaggatggcagtgctcatttgtggaggtgataatgctagaaaacagctcaggccatgactagcatagtgccacaggctgatgaacctgttggtcctgctgggcagttttagctcagcagcattttaaccatttgcaacgctagaagcaacggcaaacattgctaatgtaacatttctttatatggctagagtgctggaactagatgtcatggaacttttcaaaaatactgaggctttatgttcagttctgaataaaattttacctccaaattttctttttttttttgagatggagtctcactctgtcgcccaggctggagtgcagtggcatgatattggctcactgcagcctctgcctcctgggttcaagcaattctcctgcctcagcctcccgagtagctgcagttacaggcacccaccaccatgaccagctaatttttgtatttttagtagagacggggtttcaccatattggccaggctggtctcgaactcctcacttcaggtggtctgcccgcctcgacctcccaaagggctgggattataggcgtgagccaccatgctcagccaatttttattttttatttttcaaaattctattttattttaggtcctgggatacatgtacagaacgcaggattgttacataaggaaa

SEQ ID NO: 1976 - DNA, 604 bp, Homo sapiens
acctctcttctcctttcacctgcatgtcataaggtggtcatggatatattctttcatattcttgctaaaatactcattgctggaagtaacacaagggtatcaaatttgtataaacaacagtatgatttagttctctaatataataatgcaatataacaaaatgagtccattcaactgttgtccattcaactataccttaatatatattattttattgatgcttatctatgtatacattagttctgtgcacagtctagtggatagtgatctgttaaatggataaatgaatgaatggctgaagttttatccttctgaatggatgagtggcctctctagttcattttcaagcctctagggctatgatacatgtttcctatttccagatttttctttatgttctctctttatttctagaaaacacaaatagcttctcgcccatgggggggatttttggcaggaaaatcgcactctttacctgtcatccaccttccagaaatgcaggaactgaaagactgagaaagtggaaaacacgccatgcaattgctaacagttggcagagcagcaagtgcactccagtgggtggcatttgtccctgtttctatgc

SEQ ID NO: 1977 - DNA, 4442 bp, Homo sapiens
cagagattatctcatcattgactccgagttgattggatggatgcagacagtatacagaagagcctttagagcttcatacaattgtgagctgataatctttcttagaatcatccaattggatgcacagtcaacaagcagccttctggtagttcattcatttgttcattcattctctattgagccttcaagcaccttcagtgtgacagatgtcacactaggtgctagacacacaaagataaattatgtttgtgcactgcttggagcagctcattccctcctcagaggttttgttgcagggtggagaacaggatggccagctgacaggtattccaggccctgcagctatgattttctgcactgtgatttaacaaaataacgctaggtgcaatcagtcactctcttgtgaattgcttagcaaagattattaccccagacagagtacactgagaaaaaataataaaaccctaggactggaccccaaactgaagacttcagtgaggaattgcctctttgtgacattccaccctatatcgtaacactgatgattcactttggaacctaaaagttagttacttttatgttcaacctacactcagcaattctactgcaatttgtgtctctccgtgttggctacctcttatgatctgcaatgccacatactactatcttcaggctgcaggctgagcctaggaactgagtctcagccatgctttccttccatcacccctcccatccccagctggcagttagtgttttgcaaatgatactgcaaatgattgtagtttgtgtttatgagaaaagggggttggtaaggaaaagacagaaagaaaggggattggggaaggggagagagagagaaagagagagggaggggtttaagctacttggaatttggagtttaagttgcccttaagtaaagcatatttttaataggctactataagaaacacacttttcaagggaaaaaaagtgggtttgaattttggctgccactcattagcaatattatctttatagggtaattatcatctccgggccttgatttttctaaactgtaaaatgaaatgtttggagttagagaatttttaaatattctggtatcattgattcttgtatttcttgagacaaaatcctctctttcacattctgctaattttgtaatttgtttcaccattctctcttgacacataaaaggactctgtgaaaactatcagtatcggagaagatttcctataaccatcatatcatctatgtttcctattagggcttctgacattccacatgttttcaaaggtaattggaaatactggagacaatttaagggtcattattgtgttagccaagaaaatagctaatgatgactttagctactgggctattcagcctatcatagagcccattagctcaattaagtaaatcaaataggaaaaaacatttagacttaaaaagccacccaccactacctattacttgcctgtgaggcttctatttcatggtgaattcaaattgcttgttcattgtaggtagaagaaaatgagcaatcatctgattcagcagatgcagtgattcaagatcacttagcatttataatgataaaccaaaaattatgttaaatagcaattttaaggaagcaggtaagactagaagccttctgcataaatcaggcttgagctttgcggaagtggcttctttccctgtactgaggtgtgagaagcagcacatggatttttattcctttaaaggattttcttcaagcaacagtctgtagttcaggttaatgggaaggcaaggcagtagcattgggatgaacatttatgatcccaaacattctaattctaggtgtctacagcattcaaatattgagtaggcacttacacttccaaagaccaattcttcaagataatgctgaggttaacttacagttttatatattattcaatggggcagttcacaggacatttgaagtgacttggagagaaaaaagaataccgccgttcatattattaatatttatggtacagttattatattcaggccatgctattgctggagagagccggtccattgataaatgtgcaatgttcatgaagcagtgaatatatcattcaattaaaaattcagcaactgatgtagtcagggatgtgctggtaaatgtctcacaactggctttccaggaccggtttgcagcatttgctgattttcatggtgtagacccttccctcatggctgacatcaagctaccaatgggttggcatctggcttgcacaactgttttttatttagcaatcaactcgagcacgctggcacaagttgctccagccccagtaccggacatgacttaaagagtgagggggtggaaaattacagtcaaagggggtccactacctacccaaatcctataaaacggccccacccctatctccctgcgctgactcctttttcggactcagcccacctgcacccaggtgaaataaacagccttgttgctcacacacacacacacacacacacacacacacacacacacaaagagtaaggggtgaaatggctttgcttgtaactggattccaagagaatcattcttagaccgcacacctaagtgtttactttattaccaactatcatctcaaagtgggagagaggatggggattgggtccccttttcagaaaacccctatgaaagagccctttagaaaaaggctgggcttgaggaagtcttaattctaaatatcgcggatcaggggaaggagcaggtcattccatttccttgggactcacatgtataataagcagatttcatatctgagaggcgtaagttcccttctatttttgctgctcagtgtgcaatttagtccaaaaattgactccggtgcagatcattaaattgtcaacagccagtgggtcctgaaacataagcaaggactacccagacaggaggtcgggagtttctaatgcatccccggggacctgctaggatcttgacctctctctaagagaggctttggactgattcggcataacagtgggggcagatctgctttctccaaggctgtctcttcccttctatcagtgatctccaccttgctcagcccactcaatgctgcctttgctgttacagtctaagaaatgtggctcctttttcctaacctctcttctcctttcacctgcatgtcataaggtggtcatggatatattctttcatattcttgctaaaatactcattgctggaagtaacacaagggtatcaaatttgtataaacaacagtatgatttagttctctaatataataatgcaatataacaaaatgagtccattcaactgttgtccattcaactataccttaatatatattattttattgatgcttatctatgtatacattagttctgtgcacagtctagtggatagtgatctgttaaatggataaatgaatgaatggctgaagttttatccttctgaatggatgagtggcctctctagttcattttcaagcctctagggctatgatacatgtttcctatttccagatttttctttatgttctctctttatttctagaaaacacaaatagcttctcgcccatgggggggatttttggcaggaaaatcgcactctttacctgtcatccaccttccagaaatgcaggaactgaaagactgagaaagtggaaaacacgccatgcaattgctaacagttggcagagcagcaagtgcactccagtgggtggcatttgtccctgtttctatgctctgatctgaagcttgtacaacagatgtaccaggggctggaggatggcagtgctcatttgtggaggtgataatgctagaaaacagctcaggccatgactagcatagtgccacaggctgatgaacctgttggtcctgctgggcagttttagctcagcagcattttaaccatttgcaacgctagaagcaacggcaaacattgctaatgtaacatttctttatatggctagagtgctggaactagatgtcatggaacttttcaaaaatactgaggctttatgttcagttctgaataaaattttacctccaaattttctttttttttttgagatggagtctcactctgtcgcccaggctggagtgcagtggcatgatattggctcactgcagcctctgcctcctgggttcaagcaattctcctgcctcagcctcccgagtagctgcagttacaggcacccaccaccatgaccagctaatttttgtatttttagtagagacggggtttcaccatattggccaggctggtctcgaactcctcacttcaggtggtctgcccgcctcgacctcccaaagggctgggattataggcgtgagccaccatgctcagccaatttttattttttatttttcaaaattctattttattttaggtcctgggatacatgtacagaacgcaggattgttacataaggaaa

SEQ ID NO: 1978 - DNA, 872 bp, Homo sapiens
cttcaaaaggcaaattctctatttcccccactttgattatctgcttatgctcctaaaataatgtaaatatggtcattaatcatctacaacattgtcaattaggagagtaaagccagtaatgaactctacatccctgacctcatatggtatgttgcattttaagggagctgtttttatcaatgacaatcgtattatttgtgctcataacctgggctctacatccagtgaaaggattttgatacagaatctttatttgaagagaactacacaaaaacaccatcaccatcatacctgatgtctgctattgttgaaataggcttcagcactgtagctggtggaaaccaggtcaccaaagacactgcccttgtacctggaaggcccgtccctgcccccattcacacagtgaattcatttagaagagaggaatgctgtagacagagtcattagaaaacccttcatgactgtggcgtggaaaagggctggcaaggatcacaaacagctttcctgggtttggtcttacagcatggacttcttcaccctcatctacacgtaaaatttattaacttcaaggagaggagatcagggttgcctctaccttgcattcctatgtagccatgaattaattcccaaatgccagtgtgagcctgttttccttttcatacatcgtatttgaggaaacagctggaaatattactctgtgtgccacacatcccgattcagcacagtctcttgttcccagagtggagtaaatgagtaaagaaattattcatccgccttttacctaacttggtgtgtgaccaataaattctctcaagattgattcaggttcctatattcatggaaacaaaaaaagaaaattgggcagaaaataa

SEQ ID NO: 1979 - DNA, 7881 bp, Homo sapiens
ccacaccaggagtgtccagtccttgggccttggtcagcctggagcagttgctcggccccctgtggtgggggcactatggagcgacatcggacttgtgaggggggtcctggggtggcaccatgccaggcccaggacacagagcaacggcaggagtgtaacctgcagccctgccctggtaagtgccctgggcggcaggtgactgactccctccattgctgctgagcccaggccctgccccagctgtggggggtaggtgtggggagaggaggtcggacccagggcagctccctccctgggactggagatgctgggtccctcccatctccctacctgtgtgctccccacagagtgcccccctggccaggtgcttagtgcctgtgccacctcatgcccgtgcctctgctggcatctgcagcctggtgccatctgtgtgcaggagccctgccagcctggctgtggctgccctggagggcaggtgggtacggggtgctgtgtcctgactccctgtgggggaagccggcaggtggggagggaagaggcggtggtctgagtgtcactgagcctgccctgctgcagctgctgcacaatggcacgtgtgtgcctcccactgcctgcccctgcacccagcattctctgccctggggcctcaccctgaccctggaagagcaggcccaggagctgcccccagggactgtgctcacccggaactgcacccgctggtgagggcctggccctggggtggggagcagggatgaggaagggtagggaggaggacatgggaggcatctgagtgtgcttctgtcttctcagtgtctgccacggtggagccttcagctgctccctcgttgactgtcagggtgagatgtggctgtccatgccctgctgcacctccaaagtcaaggcccgggactggcactgaggaggagagacgggccctgctcacagactagacagagcttcagaaagccctcccctgtctgtccacactgacctctctctaactggagacccagcaccccctgccgagggctccctgggcactcagtgtggtctgccccacttgtgggggcattccctagcacacagtatacacagagccagggctgtgatgccaggaagtggaaggttctttccctgccagtgaggaaactgaggtctggaggggtgagcggaaatgaggggcctggcctggcagcccccgggctgatagcatttgccctgtggggtgcagtgttacccccatctgatcaagaccaagggcccacccaccgtgttcccagctctgccacgctgggctctgtgaatgcagacatgcagcatggccagcctccgggcagaccacccacccccagaacaggcagagacagggcacagtctctaggtctctgacaggcaggtagaaccccagagggtgagacatcagtgctgagaatagaggccgagtggacaggattggtcagggagccttttctggaggaggtgagacctggcctgggtccagctagtgtttgggtgggtggataagaaagatcaggaggtgtggttggaggctgctgtggctgagaaggcaagatggggacgtgtgggtgctcagcttgggaggggaggaatcgaggctggatccagggctgacctgaaagctgggttggatggtcttccctggcagagtgccccctggggaaacgtggcagcaggtggccccgggggagctggggctctgcgagcagacgtgcctggagatgaacgccacaaagacccagagtaactgcagttcagctcgagcctcgggctgcgtgtgccagcccgggcacttccgcagccaggcaggcccctgcgtccccgaagaccactgcgagtgctggcaccttgggcgtccccacctggtgagacaccgaaccccctctgctaccactcacccattcctgaccccaagcctccccatctgtctgtaactccactggctcctccccctactccaggccctgcagcagccggcagggctccgctctccccctgggacagtctctggccccaacagttcatctccttcctgggtctcttgttgcctgactccatccaagcccattgccccggctaggcactcacaggctgggcttggggatcagggatactattatagaaaagtctgcaagttggagccgggcacggtggctcatgcctgtaatcccagcactttgggaggctgaggtaggcggatcatgaggtcgagagatcaagaccatcctggccaacatggtgaaaccccatctctactaaaaatacaaacattagctgagagtgctggtgcgtgcctgtagtcccagctactcgggaggctgaggcgggagaatcacttgaactggggaggtggaggttgcagtgagccgagattgtgccactgcactccagcctggcgacagagtgagactccgtctcaaaaaacaaaacaaaacaatacaaaacaaaacaaaacaaaacaaaacaaatctgcaagttgggagagaccaagaggaggctctcccctactctccccagcctggatctgaatggcaggaggcctgtgagagctgcctctgcctcagtgggaggcctgtctgcacccagcactgctccccactcacctgtgctcaggtacgccctgcatccctgctactctccggggtggttccccccttacctgggctccggtaccccctgcagccctaccaccctccctggttcctcgggctccttcctgggaccctcctccgaggttggtcttagggtctctgagtggggagggcgggccgggctccaggtgtcaagaccaccttgggactctctccctctgcagggcgaggagatggtgctggagccagggagctgctgtccctcttgccgcagggaggctccgggtatggagggaacctgggtgcattgtggggtgcctctccctggtctagacccttctcccctgccaccccacacctggcctttgcagcctggcagctgcctgactcccccaggccaacccaccatggggatttgaggagtgaagaccccagcacatatcatagcgcctggtcacctcgccccacacgcttccctcagacccaggccctgcccctcttcccacagtcccctcagtcccctcctcctcctgtgctctgtccccccccccacagtctcctcagtcatcccctcctcctgtgtcccctccacagtcccctcagtcatcccctcctcctcctgtgctctgtcccccccacagtcccctctgccatctcctcctcctgtgtcctctacagtccccttagtcccctcctcctcctgtgtccccctccacagtccctcagtcacctcctcctgtgccttcccgcacagtcccctcagtcacctcctcctctgtcccccccacagtcccctcagtcccctcctcctcctgtgctgtcccccacagtcccctccatcatcccctccacctgtgtcccctccacagtcccctcagtcccctccacctcctgtgtcctcccacagtcccctcagtcccctcctcctgtgtcctcccacagtctcctcagtcatcccctcctcctgtgtcccctcagtcatcccctcctcctgtgtcccctccacagtccccgcagtcatcccctcctcctgtgtcctcctccacagtctcctcagtcccctcctcctgtgtcccccccacagtcccctcagtcacctcctcctcctgtgccctcccccacagtcccctccatcatcccctcctcctgtgtcccccccacagtcccctcagtcacctcctcctctgtccccccgcacagtcccctcagtcacctcctcctcctgtgccttcccgcacagtcccctcagtcacctcctcctctgtccccccacagtcccctcagtcccctcctcctcctgtgctgtcccccacagtcccctccatcatcccctccacctgtgtcccctccacagtcccctcagtcccctccacctcctatgtcctcccacagtcccctcagtcccctcctcctgtgtcctcccacagtctcctcagtcatcccctcctcctgtgtcccctccacagtcccctcagtcatcccctcctcctgtgtcccctccacagtcccctcagtcccctcctcctcctgtgtcctcccacagtcccctcagtcccctcctcctgtgtcctcccacagtctcctcagtcatcccctcctcctgtgtcccctccacagtccccttagtcacctcctcctcctgtgccttcccgcacagtcccctcagtcacctcctcctctgtccccccccacagtcccctcagtcacctcctcctcctgtgccctccacaacagtcccctcagtcatcccctcctcctgtgtcctcctccacagtcctctcagtcatctcctcctcctgtgtcctcccacaacagtcccctcagtcatcccctcctcctgtgtcccctccacagtcccctcctcctctgtcccccccacagtccccagtcccctcctcctcctgtgcctcccctccacagtcccctcagtcacctcctcctcctgtgtcctcccacaacagtcccctcagtcatcccctcctcctgtgtcctcccacagtcccctcagtcacctcctcctcctgtgccgtcccccacagtcccctcagtcacctccttctcctgtgcctcccctccacagtcccctcagtcacctcctcctgtgtccttccacagtctcctctgtcacctcctcctcctgtgcctcccctccacagtcccctcagtcatcccctcctcctgtgtcctcccacagtcccctcagtcacctcctcctcctatgcctcccctccacagtcccctctgtcacctccttctcctgtgccctccccacagtctcctctgtcacctcctcctcctgtttccccctgcattccccctgtcacctcgttctcctgtgcctccccacccccacagtcccctcagtcacctctgcctcctgtgccccacccccacctcctgccactcaatgcccctccccacagaggagcagtcgccctcctgccagctcctcacggagcttcgaaacttcaccaaagggacctgttacctggaccaggtagaagtgagctactgcagtgggtactgcccatccagcacccatgtcatgccagaggtgagccagggacctgctgtccaggccaggggaatcacgttggccagtggccaccgagggctgccctgagcctgggacctgggcagaaccagagtccatgaggcacaaggtgcttctgatggagataacagtggagttggggaggcagatggtcagagctttccccaaggcagtggtgtgcacctgcaggttggcccagaggtttcactgggtgcctgaccccctcccacagaggtcttctgtggccccacaccattcccagagtgtgcccgctgtgcccttcaaggcaatgagccaggagcccagcaaagaaaggcatggaggagctaagctagcctctgacatcagaacccatcacacggtgcatgagagcatgagagctctgccggaatgcactttctacagagaggatcaccgcacacatttcctgcaagctgtccgagccaggctggctctgagtcttgggcaggtggctccgctctgcgtttgccctctgtggacccagaagcccctgatccttcttaggatcttccaaggggctctgtgcccaccctgactcccctcagcctgatgagctgtaacctgagctgcctcctgccagggtcctctctccagcttcactcacactactcctgcctgcccctaggcccacctcccagcactctgcggccatcccttctgcttcagcctacctggtttacctcatcctggaagacaaggatactttcctacctggtccccaaagacacagcccctcaaccctcggccgctctacggctcccccaggcgcgccctggacctcctggaaatactttcccaaatcactttcggaattttttttcacacttttagaatttttaaaacatagagtgagaaaagagagaaagtaattaagagatgcttttttttttttcctgaggaaagaaattgatagtgggatacaaattggagggaaattttttcgctgaaaaacctcttgcagtttttgaacctggcattgtatgaatgtactacccatttaaaagtaaaattataaatagaattatacataaaattaaatgatatgcttataggactctgatataggtgctttaaccacagtgcacagggatctgctttggagtgaaaactcactttgcacttgggatcagaactatgcagttagaactgacttatttgtagtttcatagattataactctgtctgtccaactagactctaagccccttgcggtagaagtatgtccttccccctgcagccaggaggcactgatgggaacgttaaaagtattcgtttaacctgtaggttgttggacattcagacagtgggggtgaaggaggtgggcttcttgcaaaaggggcttggcagtggcccagccaccctgctcagtgaagagggtgggatctggccctcccaccatcccaccctgcctaagatgggaaaggccaagggaggggaggaaactccatttggccctagttcacccgctccctctcgcccaggagccatacctgcagagccagtgtgactgctgcagctaccgtctagacccggagagccctgtgcggatcctgaacctgcgctgtctgggtggccacacagagcccgtggtgctgccggtcatccacagctgccagtgcagctcctgccagggtgggtctgggcagggaggggacggggcaggagcctgggcaaggacccagtgttgtgaaccagacccaggaacacacgtgtagctcctcactccatccttcttccttgagtccttccagtccacgtttttccttcttctcggtgttcttgttaatttcatctcctatcatgcatacttgtgggtgtctggggtagttgcacctagttcaaaccccagctcatctgtttcctttgtttccttgctcagcctccctgacatcatctttttttttttttttttttgtgatggggtctcactctgtcacccaggctggagtgcagtggtgtgatctcggctcactgcagcctggaactcctggtctcaggtgatccttccgcctcagcctcctgagtagccgggaccacaggtcacaggtgtgagccaccatgccgggctaatttttcttttccttttttttttttttttttttttctgtagggacggggtttcgccatgttgcccaggctgttcttgaactcctgggctcgagtgatccacctgcctcagcctcccaatgcgctggggttacaggcaggaaccactgcacccagccccctgacctcatcttttaagcaaggctgacattgctatgcaggcttgttgggtggacttggtgagggcacgcgtgtgaagtggctggcaggtgcctagttctgttaagcacctgccatatgataacctgaggtcccactgtgtggcagatgaaggggaaacagaggtggaaggcacccgtgccacctgggtggagcacagtggaaggcctggtgttggctctgggcgtcctcctggcaccagcctgaccactctgcctctcttactaacccatctctccctcacgtgtcccctgggaggtgacttctcaaagcgctaacaggctccgctgggtgagtccacagctgtccctcttgtgatcatgggactcagcagcactgaccacgtccttccacgctctctcacctgcccccaactgggggcccatgacttggcattagcatgttccaaataaagtgatactggcaacaaat

SEQ ID NO: 1980 - DNA, 2304 bp, Homo sapiens
cttcctccacctggacacccagggctgctactcagggccctgcccaggtgagtgttcaggggaagtgaaatcacctctctacttttcctaccttgggagattcagaaaataaatgttcctagttcccggatcatcccttaaaataagcctgccctgtctgtgcccccatgttttgctcagttcctttcctcttcccaccatctcttccctcggggccctccttgtagggtgagagggcgtccagccagctgggcctttcaggcccctcttgcctgtttcctgtgcagggtctcggcagggctggggtgagagggagggcaggcaggggagaggtgggctgacacacccctccggtccctagaggagtgtgtgtggagcagctggagcagctggacgcgctgctcttgccgggtgctggtgcagcagcgctaccgacaccagggcccggcgtcccgaggggccagggcaggcgccccctgcacgcggctggatggccacttccggccttgccttatcagcaactgctctggtgaggctccagcagcaagttaaccagggagctgcgcagggcagcagccaccaagggtccctgctggaactccctgctcccctcccctcacagccaatgtagtgccccaagacctcagagcagctgcctgcgcccgtgcctgccctcaaacccagctgctcccctgctccccccagatactccctcatcacagctgcgaccccaatccctcaccacaatttgtccaccctgcagctgccggcccgcctgtggctttggcccatgtagctgccctctaggagggtgtcttacccagctcctgctgcggctgccctccatctctgcccctctgtctcccatctctgcccctctgtctcccatctgccaatttctggagcacctgccaaggcccctcactcctgcagccccctcctcagctgcctcctccaggcatcttcctggctctccaaggcccaacccatcctgatccttccctggaggtgcccacaggtgctgagtggatgccagatgggggatactggtctgttccaacttgcggagggtgggcatcttgtactctcaccaggtgaccccaagggcctcagtagagccacgcggcatgtgctctgggctttgggagtgatgtctctgggctgttcccccacaagcctgcctctcccccatctcccccagaggacagctgcacgcctccctttgagttccatgcctgcggctccccctgtgctgggctctgtgccacacacctgagccatcagctctgccaggacctgccaccctgccagccgggctgctactgccccaaggtgagagctgggagctggagcaacttccaaggagaagggggtcttctgcccacactcctgctcctccttctttctgtgatgtccatggcggccccacctccttcaaaccccttggaactcggtgcctcctcccagcttgccattcactcggcatcatgcatatgcacctgctgcaggcggggcacagtgctgggtgctgggatgacacgatgatcactgccccatctctccttccacccaggggctgctggagcaggctgggggctgcattcccccagaggagtgtaactgctggcatacctcagcagcaggagccgggatgaccctggcccctggggaccgcctgcagctgggctgtaaggagtggtgagtgatggtggaagggagacagagggctggggccagggaatagggcagggaggcctggggggcccagtccagcctcaggacagaggaccctgagatgctagagtttgcagctccctcatcttgccccaaatgtgcctaggggtcaggttacccttgcatgaccacccccaccccccggaggtcctggactgggtcctgcctcccttagtctaccctgactaccccctcccacagtgaatgccggcgtggggagctgcactgcaccagccagggctgtcaaggtaaccctgacctatggagacaacagtccccattgcttgggactgggggagtttctgggatgcagaactttcagtgctaagacggggacagtcccaggcaaactgggatggtgggtcaccttaccctgcccccacaccaccctcagcctttctgtttccagcacttcctggtcatgaccctgagcccctcctgcctgtccaccagggtctctgggcccaggggtggtcactgggaagggcacccacaccctgtccttccaggtcttctgcctctgagtgagtggtccgagtggtcgccctgtgggccctgcctgccgcccag

SEQ ID NO: 1981 - DNA, 4410 bp, Homo sapiens
ccacccagggcctgagtcctgtccacaccccaggtgacggccggctccacaaggcagtgagcgtgggcccccgggtgcacatcattgaggagctgcagatcttctcatcgggacagcccgtgcagaatctgctcctggacacccacagggtgagcaggccaacgaggaatcctggcagggtacttggggggtgccctccattagcaccaagcagtccccacccagcttctcctcccttgcctcaggaggatggaaagataaaggatccagtcatgaactattagaaagtggggtcgcctgttacgtaacaggcctcttgggggtggctctgggaggcatacaagccgggtggccatgggtgatggccctggctgcccatgcccgcttctcatccccgtgtctggctgtgcaggggctgctgtatgcggcctcacactcgggcgtagtccaggtgcccatggccaactgcagcctgtacaggagctgtggggactgcctcctcgcccgggacccctactgtgcttggagcggctccagctgcaagcacgtcagcctctaccagcctcagctggccaccaggtgagcactcccaaaggccccttcccatctgtccagccctgcacaggtgacctcggagcaccatcctgggccctccttgggaccgccacacagcctcgtttatgtccactgtctcagcataattattaattagctctcctgcttcctctcaagtgcaattcagacaggaaattgtgtgtttatcttggctacctgtaaaacgaggacatgatttggtaaagtatgaaatagcacagctttgaaaagccttgcaggaaaatgtggattagcgtgtgaacgtgctttagtaatagtagggctaggaaacagtccattaacaaacccagtaaaaattggtttcagaataacctatttggattataaaatgttcatttagaaaatagggatgaacacaaagcaaaactacccctcatcccaccacctagagagaatcgcagtgagattttgatatattatcctctcaggttttactacatatgtgtatagataacaaaaatccttttattttatttcatttcatttcatttatcttgtttggagactcgctctgtcgcccaggctggagtgcagtggcacaatctcggttcactgcaacctccacgtcctgggttcaagcgattctcctgcctcagcctcccaagtagcagggattacaggtgcccgccaccatgcccagctaatttttgtatttatagtggaggcagggtttcaccatgttggccaggctggtctcgaacttctgacctcagatgatccacccaccttgggctcccagagtgccgggattacagccatgagccaccgcgtctggccaaacattcatatattttatataacattggcaactgtcctgtttgtagtgttcttgcttcacatatggatacacctggtgtcagtttttacaaaaaccaagtgagttttggtgcgtatgccaggagggacaccccagaatgttaactgtcatgatcactggctggtagatgctgtgatttttgtagtgttttcatccttcgtgcctggttgacttatctgtctcctgagtgtatccagaattactgtcctttattttttattacacagatgtatgcatgtgcactgtttaaaaaaaaagatgagaacacatcaaaaaaaattttaattaaaaaaaagaaaaagagagatctatacatacagatcccagctgtccttctaatctttttctgagggtacatactattttttattattattttttgagacagggtctctctgtgttgctcaggctggagtgtagtggtgtgattacagctcactgcagccttggcctcctgggctcaagcaatcgatcctccaacctcagcctcctgagcaggtggaaccacaggcgtgcgccaccatgcctggctaatttttctattttttgtagagatggggtctcgctatgttgcccaggttgtcttgaattcctgggctcaagcgatctaccggccttggcctcccaaagtgctgggattacaggcgtgggccaccatgcctggccactgagggtacatactgtttatgtaattaagggaagtgttatcttagctttgacttgaaataatgtgtagacagaggagatgctgactcctgtgggtggggaatcagctcaggaaaggcccttgcccaggcccaagtctgcagtgaggggtgagggaatgtgagctcaggggacttcctggccaatcccagaattctctctggccctcaggccgtggatccaggacatcgagggagccagcgccaaggacctttgcagcgcgtcttcggttgtgtccccgtcttttgtaccaacaggtgaggtgccccctcaaaaggtggaggagagaggtggggacaagtgtgcttggaaggctcccccaggcacagatgttgtaaatgcctttcctcacttccttgccccctacccctgtaagcaggtccccaggaagactcagtcccaggggtccccggagttgcccatcgtggcaccaggggcatagccagagggaggcaggggagcttggagctactgtggacgctggcacccccctaccccatgccttttctgcctacaggggagaagccatgtgagcaagtccagttccagcccaacacagtgaacactttggcctgcccgctcctctccaacctggcgacccgactctggctacgcaacggggcccccgtcaatgcctcggcctcctgccacgtgctacccactggggacctgctgctggtgggcacccaacagctgggggagttccagtgctggtcactagaggagggcttccagcagctggtagccagctactgcccagaggtggtggaggacggggtggcagaccaaacagatgagggtggcagtgtacccgtcattatcagcacatcgcgtgtgagtgcaccagctggtggcaaggccagctggggtgcagacaggtcctactggaaggagttcctggtgatgtgcacgctctttgtgctggccgtgctgctcccagttttattcttgctctaccggcaccggaacagcatgaaagtcttcctgaagcagggggaatgtgccagcgtgcaccccaagacctgccctgtggtgctgccccctgagacccgcccactcaacggcctagggccccctagcaccccgctcgatcaccgagggtaccagtccctgtcagacagccccccggggtcccgagtcttcactgagtcagagaagaggccactcagcatccaagacagcttcgtggaggtatccccagtgtgcccccggccccgggtccgccttggctcggagatccgtgactctgtggtgtgagagctgacttccagaggacgctgccctggcttcaggggctgtgaatgctcggagagggtcaactggacctcccctcgctctgctcttcgtggaacacgaccgtggtgcccggcccttgggagccttggggccagctggcctgctgctctccagtcaagtagcgaagctcctaccacccagacacccaaacagccgtggccccagaggtcctggccaaatatgggggcctgcctaggttggtggaacagtgctccttatgtaaactgagccctttgtttaaaaaacaattccaaatgtgaaactagaatgagagggaagagatagcatggcatgcagcacacacggctgctccagttcatggcctcccaggggtgctggggatgcatccaaagtggttgtctgagacagagttggaaaccctcaccaactggcctcttcaccttccacattatcccgctgccaccggctgccctgtctcactgcagattcaggaccagcttgggctgcgtgcgttctgccttgccagtcagccgaggatgtagttgttgctgccgtcgtcccaccacctcagggaccagagggctaggttggcactgcggccctcaccaggtcctgggctcggacccaactcctggacctttccagcctgtatcaggctgtggccacacgagaggacagcgcgagctcaggagagatttcgtgacaatgtacgcctttccctcagaattcagggaagagactgtcgcctgccttcctccgttgttgcgtgagaacccgtgtgccccttcccaccatatccaccctcgctccatctttgaactcaaacacgaggaactaactgcaccctggtcctctccccagtccccagttcaccctccatccctcaccttcctccactctaagggatatcaacactgcccagcacaggggccctgaatttatgtggtttttatacattttttaataagatgcactttatgtcattttttaataaagtctgaagaattactgtttaa

SEQ ID NO: 1982 - DNA, 1251 bp, Homo sapiens
tgcagtaaaatagactttactgatgtacggttctttacattttgatgcatgcagagactcatctaaccaccaccccaatcaggatacaggcgagtcccacacctcctgctgccccttcatcctcacaccctcccacggggacagccagcgtgggtgcggcttgacttcccgctggcctctgctcgatatgctgcttattcctaggatgattgaaggctcttagaagagaagtccagtccttcctcataccagtgtatctcatgtcacacatagggtcaaacttctaaacctttattactgattagtacaaacacaaacggagcaatgacaacagcagtgaggagaggccctgacaacgagggccgcccctgcccggggtgaggctgcacagcgccagctccaggctgggccagcttggcgacactggcaacacaggcttgaccttggccacagctcagcagtagaaaggttcttggacagggtgccaggacacacgctggggctgctgtcacaggacaatcttaaaggagctgaacaagagaaaagcggtgggttttctgctggaagaggagggcagggactaaacccgaacttgcccccttctccctttagacccttctttggaacgggctatgttccgtgtgtcagccccctctgcaagaactccccgagacatccagagggagctttctggacccacacactgggtcagagcttctaaacctttattactaatgagtacaaacacagagcaatgacaatggcagtgggaaggggagaggtcttgacaaggagggctgcccctgcccggggcgagactgccagcttagccggccctgtgtgtggggactggggctttctctcaccctggcaccacctcctgtagccatgccctaggcccagaggcagcaggtcggaacctgcaggtacccagaatgaagggggaccactgtcatacctggcaaagtctggagaacgggagatgacgtgctggaactcagagaggttgatggttccatccctgtcaatgtcagactcctccaggatctgggaaagggagagtttcaggccagagccccaactgctccctcccgctcccaggcctgctcagctgctcacgttgtcgatgagctgcttcatctcagacgcactaagccgtgtgtcctcgccctctcccgtgaggcagttcaccagccggctcaggtcttctctgttcaaggttccgtcatcatcaaagtctagagagcagac

SEQ ID NO: 1983 - DNA, 7421 bp, Homo sapiens
agtatgagccgcacagcctacacggtgggagccctgcttctcctcttggggaccctgctgccggctgctgaagggaaaaagaaagggtcccaaggtgccatccccccgccagacaaggcccagcacaatgactcagagcagactcagtcgccccagcagcctggctccaggaaccgggggcggggcaagggcggggcactgcatgcccggggaggaggtgctggagtccagccaagaggccctgcatgtgacggagcgcaaatacctgaagcgagactggtgcaaaacccagccgcttaagcagaccatccacgaggaaggctgcaacagtcgcaccatcatcaaccgcttctgttacggccagtgcaactctttctacatccccaggcacatccggaaggaggaaggttcctttcagtcctgctccttctgcaagcccaagaaattcactaccatgatggtcacactcaactgccctgaactacagccacctaccaagaagaagagagtcacacgtgtgaagcagtgtcgttgcatatccatcgatttggattaagccaaatccaggtgcacccagcatgtcctaggaatgcagccccaggaagtcccagacctaaaacaaccagattcttacttggcttaaacctagaggccagaagaacccccagctgcctcctggcaggagcctgcttgtgcgtagttcgtgtgcatgagtgtggatgggtgcctgtgggtgtttttagacaccagagaaaacacagtctctgctagagagcactccctattttgtaaacatatctgctttaatggggatgtaccagaaaccacctcaccccggctcacatctaaaggggcggggcgtggtctggttctgactttgtgtttttgtgccctcctggggaccagaatctcctttcggaatgaatgttcatggaagaggctcctctgagggcaagagacctgttttagtgctgcattcgacatggaaaagtccttttaacctgtgcttgcatcctcctttcctcctcctcctcacaatccatctcttcttaagttgatagtgactatgtcagtctaatctcttgtttgccaaggttcctaaattaattcacttaaccatgatgcaaatgtttttcattttgtgaagaccctccagactctgggagaggctggtgtgggcaaggacaagcaggatagtggagtgagaaagggagggtggagggtgaggccaaatcaggtccagcaaaagtcagtagggacattgcagaagcttgaaaggccaataccagaacacaggctgatgcttctgagaaagtcttttcctagtatttaacagaacccaagtgaacagaggagaaatgagattgccagaaagtgattaactttggccgttgcaatctgctcaaacctaacaccaaactgaaaacataaatactgaccactcctatgttcggacccaagcaagttagctaaaccaaaccaactcctctgctttgtccctcaggtggaaaagagaggtagtttagaactctctgcataggggtgggaattaatcaaaaacctcagaggctgaaattcctaatacctttcctttatcgtggttatagtcagctcatttccattccactatttcccataatgcttctgagagccactaacttgattgataaagatcctgcctctgctgagtgtacctgacagtagtctaagatgagagagtttagggactactctgttttagcaagagatattttgggggtctttttgttttaactattgtcaggagattgggctaaagagaagacgacgagagtaaggaaataaagggaattgcctctggctagagagtagttaggtgttaatacctggtagagatgtaagggatatgacctccctttctttatgtgctcactgaggatctgaggggaccctgttaggagagcatagcatcatgatgtattagctgttcatctgctactggttggatggacataactattgtaactattcagtatttactggtaggcactgtcctctgattaaacttggcctactggcaatggctacttaggattgatctaagggccaaagtgcagggtgggtgaactttattgtactttggatttggttaacctgttttcttcaagcctgaggttttatatacaaactccctgaatactctttttgccttgtatcttctcagcctcctagccaagtcctatgtaatatggaaaacaaacactgcagacttgagattcagttgccgatcaaggctctggcattcagagaacccttgcaactcgagaagctgtttttatttcgtttttgttttgatccagtgctctcccatctaacaactaaacaggagccatttcaaggcgggagatattttaaacacccaaaatgttgggtctgattttcaaacttttaaactcactactgatgattctcacgctaggcgaatttgtccaaacacatagtgtgtgtgttttgtatacactgtatgaccccaccccaaatctttgtattgtccacattctccaacaataaagcacagagtggatttaattaagcacacaaatgctaaggcagaattttgagggtgggagagaagaaaagggaaagaagctgaaaatgtaaaaccacaccagggaggaaaaatgacattcagaaccagcaaacactgaatttctcttgttgttttaactctgccacaagaatgcaatttcgttaacggagatgacttaagttggcagcagtaatcttcttttaggagcttgtaccacagtcttgcacataagtgcagatttggctcaagtaaagagaatttcctcaacactaacttcactgggataatcagcagcgtaactaccctaaaagcatatcactagccaaagagggaaatatctgttcttcttactgtgcctatattaagactagtacaaatgtggtgtgtcttccaactttcattgaaaatgccatatctataccatattttattcgagtcactgatgatgtaatgatatattttttcattattatagtagaatatttttatggcaagatatttgtggtcttgatcatacctattaaaataatgccaaacaccaaatatgaattttatgatgtacactttgtgcttggcattaaaagaaaaaaacacacatcctggaagtctgtaagttgttttttgttactgtaggtcttcaaagttaagagtgtaagtgaaaaatctggaggagaggataatttccactgtgtggaatgtgaatagttaaatgaaaagttatggttatttaatgtaattattacttcaaatcctttggtcactgtgatttcaagcatgttttctttttctcctttatatgactttctctgagttgggcaaagaagaagctgacacaccgtatgttgttagagtcttttatctggtcaggggaaacaaaatcttgacccagctgaacatgtcttcctgagtcagtgcctgaatctttattttttaaattgaatgttccttaaaggttaacatttctaaagcaatattaagaaagactttaaatgttattttggaagacttacgatgcatgtatacaaacgaatagcagataatgatgactagttcacacataaagtccttttaaggagaaaatctaaaatgaaaagtggataaacagaacatttataagtgatcagttaatgcctaagagtgaaagtagttctattgacattcctcaagatatttaatatcaactgcattatgtattatgtctgcttaaatcatttaaaaacggcaaagaattatatagactatgaggtaccttgctgtgtaggaggatgaaaggggagttgatagtctcataaaactaatttggcttcaagtttcatgaatctgtaactagaatttaattttcaccccaataatgttctatatagcctttgctaaagagcaactaataaattaaacctattctttctgtgtgtgtgagcgtgcgtttgtgtttggtagtgttcctagggcagaggtggagcagggatgcacttatcatgggaagggaggtagaaaagagaattggatagcctgtgatctttggtggaatttattccttttgcctaggcctttcagaccctgcttgatttccgtagacacttcaggttgtggcaagggagagctggtctgcaatcggaagtaccagcctcttccctagagcacaactagaaagaagaactatagagtgttataagggaggccctgagatggaaggaccatcacacagaaatgataatatcttcatttcagggtgttccaggggaaaagcaggagaaagatttggggctcagtagaaggaaaagcttcctagtggtaagagtgattggcaataccatgaggtacctttaaaagatagtgaactcctgtccttggaaatattaaaccacaggctagatatcatttaatagggatgtgaagtagagtaagtcactgcccttggtgtgcaattgtgaacttgtcaatttctgaggtccctttctacttagatatataatacaagatttctattaggtatgggtgctctgatgataatgaaaatcccagcagctatgtatgggatggttacaccagacactgtgctaaggattttctttgaattgtttctcactcaatcttcacggtagctcagtgaggtaggtaccattatcactgctagaaagcagtgaacttatatggtcttactgtggcactgggtccttaaacattatgcaaaactgtgagcaacttttatcggtttgttcttttaagaacataacacagcactctaaaaatagatctaactagattgttcacatctagcgattaaggccaccctgagattatagctgcatcatcaggaacccaagatctgaagcattcagtcaaagcctcttggccacctctctttttgtcatggccttcttggacttggagggggagaatggaagcaagtaccaaggagaaagtgttctcagaaaagccacacccattagaaaaatacaaggcctgaaaggtgtgagtgggacttgacacggaagagcatttcaagcttaagaaaaaaaaaaaaaagaagaatgtgggaggatgtcagcaacaatgcttgagattccctggtcccccaaagagtctctcctccataaaactaatgagaatgtgacaaaaatagattcaacttcttatagctctggaaattaactgaagatgtatagcaatttgcagagcatttattcaagaaaaagactaaatctctgtgagcactgtgatattgtaacttgcactactctcatctccccctctccagctccacaatagctttgaaaccaacagcctgcaattaccatgaaaatcagcagtctggcagccactgaaggtgacagaatggagttggagttctttcaaagtcccattcctagacaattgtcactatttgacctgtttggcaggccctggaagctccacttgcaaggctatatttgacctgactggaagcttcccagggtaaaaaactttgtcaaaacaactagaggcaattgattctctttgtggctgcctggggtaatgtataacagttggggaaagcaattggctaaataaaaagcctaaaaggagaagctggaaaaagagattttcatagggactttgaaaagctccaaagtgttattggcaatctagactgccaaatgcataaataggactccatccatgcccaggactgtgcagatgctcaggaaaaacccaagaaagccttaagctctcacttcaagctgatcttgaggctctgcacaagccataagtaaagggaatgcagagttgtcaattgcatggcggagtgttgagtgtgcctcagcattcacacagagctccttggcagagactggttgaattattgattccaagtgtttgaggaaatccgtgtacaactattagatgactactaaccaagcagagacttcagtgtccacacacaacaaaaaatacagactttacagaattagttcagaaaagtcattaaacaaagaaacaacaacaaaccctggggaaatgacagtacgatcaaaccatgcatggccctgcctgcatgtgggaatcctcatccaagtcatactttctaaacatcataaaaagcccaaaccagtctcctttcctggctctctcaagtcattttcagaccaggttaggagacgtgagctgctctccacaaaaagcctcatgtgagtaataaatgtttcatactctcttggggtgtgtgtaacatcatcagtctcagcatctaaaccaaattttggtgacatttcatcttgtttatgcagatgtccaccacacctataaataaacaaactactgaaactgattcaagaaaaaataaaaatctgaatagagctatcacaagtaaagagattaaataagcaatcaaataacttcccagaaagaaaagcccaatttaggatgtcttaactgattaatgttagcaaatatttaaagaagaattggtacaaattcttcacaaactcttccagaaatggaagaggaggaaacactttccaccttattttctataactagtattaccttgataccaaattctgacaaatacatcaaaaataaaaccatagaccaatatctcttttaagtgtaaatgcaaaaaaattcaacaaaatgctagataactgggtccaacaacatatggaaaggattatataccttgaccaagtgggatttgccccaggaatgcaagattgatttaaccatcagtgtaatgcatcatattaatagaataaagacagaaaccacacaatcatctcgatacacgcagaaaaatcatttggcaaaattcaacacccctttgtaataaaatcactcaacacactaggaagagaagggaacttcttcaacctcacacatggcatctatgaaaaacccacagctggccgggtatggtggctcaagcctgtaatcccagcactttgggaggctgagccaggcggatcacctgaggtcaggagttcgagaccaacctgaccaacatggagaaaccctgtatctactaaaaatacaaaaaattagcccggcgtggtggcaaatgcctgtaatcccagctgcttgggaggctgaggcaggagaatcggttgaacccaggaggtggaggttctggtgagccgagatcacgccattgtactccagcctgggcaacaagaacaaaactctgtctcaaaaaaaaaaaaaaaaagaaaagaaaaacccacagctaacatcatacttaaaggtgaaagactgaaagctttcccccaagaggaactaacaggatatctgctgtcactatttttattcaatattatactggaggttctacctagggtaattaggcaaaaaaaaaaaaaaaaaaaaaaaaaaaaaa

SEQ ID NO: 1984 - DNA, 298 bp, Homo sapiens
ttcttttttttgagacagagtctcgctcagtcacccaggctggagtgcagtggcgcgatctcggctcactgcaagctctgactcccgggttcacgccattctcctgccttagactcccgagtagctggcactacaggcgcccgccactacgcccggctaatttttttgtatttttagtagagatggggtttcaccgtgttagccaggatggtctcgatctcctgacctcgtgatccgccgcccatctgggcctcccaaagtgctgggattacaggcgtgagccactgcgcccggccaa

SEQ ID NO: 1985 - DNA, 2371 bp, Homo sapiens
tatttttatgtgttttacgtaagtgcatgtgtaatttattgatagcaaggtttgcatgcatttattctgtgaatcagctcgggctggacttcctgggaatcccaggcgaagatctcagggtctctttctgctgatggctctcccttccacgaccggtcccttcccttccctgggcttcaatttccacgttggtaaatgaaagggttaagctatttctacaatcccttccttcttgggcattgttgattcctgggaagccctgacgaagagagaggacggtaagagtttacctaaacgtctctgcaccccatgcttgaaaactcaaagatcagccccgaagcgtccatgaatcctgggacaaagaaaaggacttcaaggcctcatacctatcaacaagagagattcctgctcctccagcccctccaccccttcacttttgtgctgaggaaccccccatcaccaggaggaaggaagcctgcccagtaaaggggcactcccaacagcccaccagctcctgcgcccagatgcccctgaaatcctcggactcattttgtccagcagccttgactttgtcaggggtaccagtcatgtaatccctgaggtgtctacaaaaccccgcagtcatgggctccatgcacactcaagaacaatgaggagcttcaaaagctaaggaggcttttcccaatgcttccatggtgtctcgatggttcctgaggtcttgatactctgccatggcttggcagtttggaaatggtttcctggtctggctgtcctaaggatccctggttgtgtgactgggaacaaacccttcaaccttccaggcacagttttcttctgtaaaatgagagggttgggtgcaagtttcctgaggccctggggccttgtggctgagtttatctccccgactccctgtccatcctcctatggaagtactcataaagcatttcacagccacaaggaaaaggcacacaaggtcccccagcccccacacacacaggagccacacctgcacccctccctcaaggccaggcttcctctcccccagcacacgcaagttcttctcggcctcccagctcttttcagcagctccccagaatggaacggcccagccatggcttctcagaggacagcttcttggcagagctgggagtgggtggagtagagcacattttttcctttgaggtccaaagggctgtcaaccctcttcagctgccctggggcccaacagccacagagagagatttatgacctggatagctttgatcccagtctccgataaacatcaggaacagctcgaccctaaaccccgaggagaaggtttatggatcagaatgcagcctcctggagaaaacgagcccaggagggggtgcccagggactgattgggcccttaaagttctctcatcaacagacccactgccatctgcccttgctttctggggagagggacacagctgggtggctgaggcctttgaacaagaagcaatgctgatcagagagaggtgaagatcctgtcaaaggttaaactggggaaggggtggaggcggtgggcccaggcctctgaaattccccaccctcgctcacctgttcttccaaacagcgttgtccatgtttctctaaaccacacaccaagacaaagcagagagagaacgcaccagataagatctgagctgagaaaggaatgtttcatccgtgggttttgttgtccctgttcttcttgttgatactgttgttcttggtgatgatgggggtggttaattgcttgattatatttcatccctgtcttctttccaaaaggacagggggccaggagagtctgtgtggtcacaaacccttcatagctttttcccgtcccctccacttgaccatgtgggatggcagggaatccacaccctcttggaacatcccctgttttgctgattgaaaagagatcctagaaacagcactacatccaaggtgaaggaggggccagccagtctcctctggatgccacctcagatgggttgcctcaagtttaaggtctcagccacatccataaaactgttcccctctgtgaagcaacttctgccatggggaggtggagaaggatcttctcaaagcaagtccgacaggcagagtcttcactctccggggtccggagtgttctatagacatcgggaaacatacatccatctaaaaagacaccctaataaacctgcagctattcattgcacccaagaaaccagcctgtggcccacgcatgcaggaataaacacatatttgctgagaaccaaattgggtctaatgaccctggcctgtctcgcagggtcatcctgagaaatagctgatgtcagacgacgagcgtgagcagctgttctccatttgcactcaac

SEQ ID NO: 1986 - DNA, 129 bp, Homo sapiens
acgcctgtaatcccagcactttgggaggccgaggcaggcagatcacgaggtcaggagttcaagaccatcctggctaacatggtgaaaccctgtctctactaaaaatacaaaaaattagacaggcgtggt

SEQ ID NO: 1987 - DNA, 2236 bp, Homo sapiens
  misc_feature (996)..(1995): n equals a,t,g, or c
tgcagggagctgagatcgcgccactgcattccagcctgggtgacagagtgagactccatctcgaaaaaaaaaaaaaaaagaatctgaggtttaattcaaggagcagtggaagccattcattccaaattgtcaggatctatgcaggtatgcccctccctgtcctctctgagcttagggtcaatgcctagaaatgtatgtgattgctaatagatttgctacatgccaggcactactctgagcactttattccttcctttctaatttgtgtgccttttatttcttttccgtgctttattgcattggctagggcctccagtacagcactgaataggcatggtgacagcacgcagacatcccttccttgttcctgatcttaggagaaaaacattccacttcccactcccaccaggaaggataagattcgctgtagttttgggtgttattattattatttttttggtttgcttgagacagagtcttgctctgttacccaggctggagtgcagtggcacaattttgactgactacaacctccacttctcaggttcaagcaatcctcctgcctcagcctcccgagtatctgggactacagtgtacaccaccacacccagctaatttttgtatttttagtagagacagggtttcaccatgtttgccagtctggtcttgaactcctgacctcaagtgatctgcccgcctcggcctcccaaagtgctggaattacaggtgtgagccactgtgcctggcctagttttgggtggttttttgtagatgtcttttatcaagttaagaaagtttccttctagttctagtttgccgagagttttcttttttaaaatcatgaatggatgttgaattttatcaaatgcttctacatttattgatatgataatatcatttttctctaataactatacatttatttaagcctcccaacagtcttatgaggtagatactgggttcacaccaatttaaaaaaaaaaaaaaaaaaggggnnnnnnnnnnnnnnnnnnnnnnnnnnnnnnnnnnnnnnnnnnnnnnnnnnnnnnnnnnnnnnnnnnnnnnnnnnnnnnnnnnnnnnnnnnnnnnnnnnnnnnnnnnnnnnnnnnnnnnnnnnnnnnnnnnnnnnnnnnnnnnnnnnnnnnnnnnnnnnnnnnnnnnnnnnnnnnnnnnnnnnnnnnnnnnnnnnnnnnnnnnnnnnnnnnnnnnnnnnnnnnnnnnnnnnnnnnnnnnnnnnnnnnnnnnnnnnnnnnnnnnnnnnnnnnnnnnnnnnnnnnnnnnnnnnnnnnnnnnnnnnnnnnnnnnnnnnnnnnnnnnnnnnnnnnnnnnnnnnnnnnnnnnnnnnnnnnnnnnnnnnnnnnnnnnnnnnnnnnnnnnnnnnnnnnnnnnnnnnnnnnnnnnnnnnnnnnnnnnnnnnnnnnnnnnnnnnnnnnnnnnnnnnnnnnnnnnnnnnnnnnnnnnnnnnnnnnnnnnnnnnnnnnnnnnnnnnnnnnnnnnnnnnnnnnnnnnnnnnnnnnnnnnnnnnnnnnnnnnnnnnnnnnnnnnnnnnnnnnnnnnnnnnnnnnnnnnnnnnnnnnnnnnnnnnnnnnnnnnnnnnnnnnnnnnnnnnnnnnnnnnnnnnnnnnnnnnnnnnnnnnnnnnnnnnnnnnnnnnnnnnnnnnnnnnnnnnnnnnnnnnnnnnnnnnnnnnnnnnnnnnnnnnnnnnnnnnnnnnnnnnnnnnnnnnnnnnnnnnnnnnnnnnnnnnnnnnnnnnnnnnnnnnnnnnnnnnnnnnnnnnnnnnnnnnnnnnnnnnnnnnnnnnnnnnnnnnnnnnnnnnnnnnnnnnnnnnnnnnnnnnnnnnnnnnnnnnnnnnnnnnnnnnnnnnnnnnnnnnnnnnnnnnnnnnnnnnnnnnnnnnnnnnnnnnnnnnnnnnnnnnnnnnnnnnnnnnnnnnnnnnnnnnnnnnnnnnnnnnnnnnnnnnnnnnnnnnnnnnnnnnnnnnnnnnnnnnnnnnnnacctgagtacagaagttcaacaccatcctggccaacatggtgaaacctgtctctactaaaaatacaaaaattagttgggcatggtggcatgtgcctgtaattccagctactggggaagaggcaggagaattgcttgaatccaggagacggaaattgcagtgagcccgagatcatgccactagcactccagcctgggtgacagagcgagactctatctcaaaaaaaaaaaaaaaaaacaagg

SEQ ID NO: 1988 - DNA, 1329 bp, Homo sapiens
ttttttttttttaaaggatattcttagtagactatatgttcacatgactcgatattcaaatggtgcaaaagtcactccatgagttatctagtgctccccattgaaggtaaaaaatactaccagttctttctggagattttatgcaaataaaaagaagggacacttatgattctcttccctattactggtggagtatgggtcactcctaatgtaggatgggatgattgccccaagctctgtcgtgagtggttgattgacggttttcttaagggaacaatgctgggaaagatgataggcgcccgccactgacccctcccgcctccctgcccctccagtaaactcccacacaaaatagcagtatgaggtgtggggaaataatcttggcctccgtcctgggtttacttttgactctgccacctacaagctgtcacctgaacaagtcctttccgttcctgtgtcttccctggtcacaagctctaagcctgaacccacactctgggaatgaagcagggtagcggcctctgcttcagcaactctgaggggtctaccttgggtggggagttggcctcatccagagggctgctggagggccaagacaaggctctggtggggaggtgtgctgagaggggattgcttatcccaccaccagcttttctgggggaggtggggaagtgatggttaaaaaatggagttcctgctatcagccatgtcctgatgaattggaaagtccccttctttctcctttcctcttgcatctcctgcctgcttcccctgcctgccctcctgtgacatgtgccctctccagcaggtatgtcacacagcaccccaagggaagggcagtgtaacgctcttttccatgatggactaccacagccagaggaagacaggccttcccttcttttctagttctttttggtttgaaaacaaggcactcttattttccccttccaagaagctggtggttcacacgggccagcacacgcattatcaaagacctagtttgtttctagtaaatgagtccattgaagtgggagccttggccgggcaaggtggctcacacctgtaatcccagcactttgggaggccgagatgggtggattgagatcgagaccatcctggtcaacatggtgaaaccctgtctctactaaaaatacaaaaattagctgggcgtggtgacacacacctgtagtcccagctactcaggaggctgaggcaggagaatcgcttgaacctgggaggcggaggcaacagtgagccgagattgcgccactgcactccagcctgggcgacagagtgagactgtctctccaaaaaaaaaaaaaaaaaaaa

SEQ ID NO: 1989 - DNA, 115 bp, Homo sapiens
gggcgcagtggctcacgcctgtaatcccagcactttaggaggccaaggtgggtggatcacgaggtcaggagatcgagaccatcctggccaacatggtgaaaccccatctctacta

SEQ ID NO: 1990 - DNA, 3502 bp, Homo sapiens
cccagctccctccccgggaccctaagagcacccccacccccacctactatggctccctggccaggttctcagccttatcatctgctacacccacgtccacccaatgggcctgggattcagggcaggggcccaggctcccctcctctgtggctcaaacggtggacgacttcctgttggagaagtggcgcaagtattttccatgtaagccccactctgggcggagccttcccacctgcctcctcctcctcctcttccttccttttcttctaccctctttctcctgctccttttctcctcttcctcttttgcatccctttgccacacctctcctcccccaacgttaccatagtccattggtccattgactctacctgtgggtccctggggaaggagacattgcaggtggccctgcagccaggagttctatgggttgggacggtttagatggagcctggctgactggggcctttattgtggattctggagctcagtagaacctaaaaggtcattgtcgtcattatcttaatagctaccatcttgtgcaatacatgatgggccaagcagtttatatatattttttcatttagttcttaattctctgaggtagtaattatttatccccattttacagatgaggaaactgagtttcagagagtttaagtagtatgctccagggtacccagtgagtgagtaacaaactcagttgtgaccccatgtctctgtgactccaggattctgcttggaacctcttggctgtgtggctaattcttgcttctgagccaggtggcctccccaggtctcagccctgctgaggattatgaaaagccataaaacaaggcatttgaggggaaacaaaatatcttctttttgccctaacccaaattgaaaagtagattaagttttaaaaataaaataaataggaccattcctgtctctcacctgtctctggcctccagccactgaagcttttccttttattgtttattctggggaggcaagaggtgctggtgggcagggtggtgaccactgcccatttctgagtcctgtccccatgctcttccagctggcatcccgctgctcagcaacagccccaccccgctggagagcaggctgggttacatgtctgccaggtgagcctccctgggggctggttggggtggaacgtcatagtcgagctgctcactgtgcctccctgggcaggtggacctctgaggggagcagacctcctggtcttaccccaagaaatcaggcaggcctctagtccacagagctgtccccgcttgcctgggtctgaggcgcccctccatgaccaggggaaagtcaagttcacaccgccaaggtcccagtggggaagggctgggcttaccctgccaaccccctgaggaagctgccctctggcccctgtggggaggagtcagcccctggtgggaccctgcccccgcccctccctctagcccctccagccccggagtctggcctttgtctttgcccttgagctcttgtttgcttcctgtggctcccttattcccccagtcctgctgagcaacatctggagtgagagggacaccctgtggaggagacagacgggcaattatttaaacctgttattaattttccattcatctcattccttgccaaatgttttcccctctccctcccttaggcagctaacagtgagtaccccccactaaccctttggccaacttgagagctgatgctggccaaggattgagttgacagaggggagcgctttgctgatgagattggcgggagcaggcggatgtgggagcccagagccttgtatcagtagcacccagcaagggggcagagggcctccaccactttcccgtttgggaactgttctggaggggcagatgttttgaagctttgaattgctagggacctcggagaagctgctctggtagctgagagaaagagggaggaggtgacagatgtgatggcctctgtgcatcctctgtcacttccgcgcctcctctctcccctcgccatgctctcctcttccttcccagtgagcagctccggctcctacagcactcccattcgcaagtccctgaggcgggcagcaccacctttcagggcataattgaggccaaccggaggtggctggaacgtgtcaagaatgaccccaggttgtatccttttacctggttcccaaactgggctgggctgtggggactgtgcttgtgccctgaggggctgaggaggatcctgttcagcctttgaccctttcatggcccctgcctggctatgcccagcgactgcagttttccttcaccttgtggccagacctctcttctcttcaacacccaagccaaaagctactttgagcctcctgcagctgggccttgatgagcacaacagagtgaaggtgtatcgcttctgaggccctgagcaggggcttggggcagcccagcctctcctccacccagaccaagtgcctgaggagctgcctgccttcttccatctgagaaagcaccgtccttccccctttgacttgcaggagccaccagggaccagggggttgagtggaacagtaaagccacacattctgtgactatataacctatctcaggctaaaatgtgtggactcgtacgagctcttgtcattgacatggcaagctgatggcgtgcggtggctgcggggtatcagggccgggagccctttgggaggaagggaggcgttagaggagctgccttcggaggctcagggagtccctttggagctggttgtttccttggccctgcagcgcactgctcggggctcccaaggaggttgtgtgtatggttcttaattcatcaggacaaagacccccagcatgtgtgtaccctgggacccgatttctctgggcccacatctatctccaatacctcagcctcagatcagaccctttcttttttgtctttcttctcttaatttttaaatgcctcttttcttgagcattccatctctctttttgaccctctcaggattgggcttagctgtccagagccctgccggagggtgctgggggctgtccctctgcaggcactgtgttttcctcaggggctgtcctcagaacacccctcctgctccctggggctcctcagggagccatttcagctggagtctcaggtctcaaaaacagcttctccgggaggccaaaaaaagactgggttggcttctggtcctcatgacggcttttatcctcctgggacactttgggtatattcatgggcattgtttccatctgtcttttctacctgtgccacccctgccctgattccacggctgcctcaggcaggcaggcaaggagctaggccggtgcccggccctggcagcaaggggtctttgtgcagttggagatgctgccgttgtggcagagcgtcctgcagccccgcttccatcagcaggctctggggtgggggctttgcaggggatgctctctgatgtttgttccgttgtttaaataaaatgcacttatttttgtttttttttttgcaa

SEQ ID NO: 1991 - DNA, 2649 bp, Homo sapiens
cttgtaggtactcattgaggtttattgtgtaagatgaatgaatgttgcaaattcctaaacatgtgattcagatgcccaatcttactctgttactttatgaaaattttttaaagctatatgatgttatatcaaaatatgttgttatactttaggataatcggtgtgttagccctgaatttcagcataagtcccatttttttccatgggagtctaggaaagctatatgtttattcagcagcaaaatacagtttggaacttaaataaactattgatcaatttctggtcttatgctagaaggaataaagcatcaagaaaaagaaaagatttgctgtcaagaccaggaaaatttgacaatagagtattagaatgcaggaaatgaggggaagtggaaaggcagcaagtaggagagaaaaagtgcagggacagtagaaagtgaatgtaggagctttctgacccatgcacttcaggaacgcaattcatccctaaaatgctgtttgctgtcttaggttgcaagtaaccaaattaaaaccagtttgaaagtagagtgagacagctgtcatcataagagtcatttgatctgtttaaaggtggctgcttgtatgcagggaccaacagtcatgttcagggcagcagctggtgcacacttcaagcacagaccataagagctaccccaggcagcacctgctaccaatagtgcaaacaactcagagagacctcgttggcataagggaatactctatcctttctgagtaaagagcaagtagaactaaaggtttcacattttaaacatactttacattcctcctcttctggggctcaagcctacttttgggccaaagcggatgttatatctgacatagagtcctcggagcagcagttgttcctgaaagttcctttttgcatctttgtgcctcatgcagtggcttacaagtcaaccagacttctcccctgacttttgatgtgtaagagcttgtgtttcaaatgggtttggttttcttaatgtcaccctaggttggtggaaaggagagtaaatggaaatggggggagcagggtcccctggggaggtttaaacagatggaagtcaattgtctcttgagaatagaggaggctattgagttttcattccacactctgctcctgttctgtcagcaaagaacaagcactactctccagcaattgctttccactggactcccccacctcggcctccctacaaaaacctagggatcaacttagttcactccaaattagaaaatttaatagtcatttgtttcttcttgtccacagggagaaccattttctttccttctttcaaaattgcccaggtcttgtgaagggttattaacaccggaaagaaatacattttaataagcttaaatctcatttctacatgaaaccatcagattttagtactgtgatattttggtccctctgtcttttaggctctgacaccaaaattgccataatgaaggtgtttcacttcttctcatttatttttatgggatcttttattcccaaatgccttttcatcccagccaaagggagaaatgttgatagatctgccatcaagaaggttccaaagctggcctgtcaggttttctgttttcttgtttattatctttgaacttttgttttaaatgttttaaacacttatttaccatgtaactaaatgtctgatagtattgaaaatactttgtgggttttaatttatttaatgctcatgaaaccctatgaggtaggtactgatattatttttattttactgatgaggaaagtgaagcaaagagaagtgaaatgaaaggtagtgagtgatgggaccagggtttggacatgggcagtctggctctaaaatgtatgcttttaactactatgtaatgctgcctcacaaacaacttgtctcacaaattgatattctggatcagaggatgtcgactggcccgcaaatgtattttgtatggctcatacacagttcagaagttttaaaaatttacatagaaatctgcatttcctgacttcttttgaaaatgggaataccaaacatcattaggcttgaattcccaatacggcaacaacagctgagcaacaagcagctgtttagactaggcactcgctctccaatttccacagtccccaccaatgcagatcatagtatcgacttaaatttcctgcctgccttagagaagcttctgagcttgtgacctctattctagctgctctatgaatggacgctgccccagtacagcgaggacctgctgcaaaatgcatttcttagtcttcaatacttattcctccttgtaactggatttctggtaagttatgtctcatggtggatctgccccaaagatggagactgaatggcagtgagtcactcgccctggcctccattgttctggagaaggttccagccacatggttgatgtcagctggttttccagagccagagctgggttgcgggacagacacacctgcatctaatagtgaaaggcaaagttgaaaggccaagaccagcctgaggtctgagggaccaagggcttcacagaggccagaagttcagaggtggacataaaaggtgttaggagaataaggaagtgaaaagaacatagtacagtgtatcagaggaggagctccaggctggcaaatatcactccc

SEQ ID NO: 1992 - DNA, 2649 bp, Homo sapiens; identical to SEQ ID NO: 1991

SEQ ID NO: 1993 - DNA, 190 bp, Homo sapiens
atgagaaagtaaacatacaacacagtaaaagttgttccaagtatttaaaaatgttctatatcttctaccttattatggctcaagatatagtaacttttgtggggttttatcattgtttttgttttattttgtgaaaacatccaagagcccgcaacagcctatagatttgcagatccttttctttcctggg

SEQ ID NO: 1994 - DNA, 190 bp, Homo sapiens; identical to SEQ ID NO: 1993

SEQ ID NO: 1995 - DNA, 13077 bp, Homo sapiens
atcccatttgaagtggtggagaaagtttacccaccagtgcctgagcagctacagctccgaattgctttttggagcttccctgagaatgaagaggacattcggtgaggccaaaggactgatggtggggagcggggtcctgatactccacactgtctgctgggtttcccatagaacaaaggagacattgtatttggggcagtggtaagaggaagacaagggagggattgcctgggattccactccctcccccccaccccccgccctggggaaggaatgaggctagggagagagtgcctagggcattgtggtctctgacagggtctgccaaaggttatttgctgagttgtggctgtgtcctcttcttcacccccaggctgtattcgtgcctggccaatggcagtgcggatgagtttcagcgaggggatcagctcttccgcatgcgggctgtgaaggacccattgcagataggtgagtgggccatcatgccatgtggcacatcctgctcctcccatcccctggcttatgaagtaagaacacaccgcaagaagctggagcatgttgtctgaataactgcagggccagggtcaagggcagagacccaggtcctgacagcactccctgaccatgcccccatttctccccagggttccacctgagtgctacagtggtgccacctcagatggtccctcctaaaggggcctacaacgtggctgtgatgtttgaccgctgccgggtcacttcctgcagctgtacctgtggggctggggccaaatggtgcacccacgtcgtggcactctgtctcttccgcatccacaacgtgaggccctcccaatttatcccggccctatcctacactccatcccccccttctctgctgcatgcctggctacaatgtgagccccctcgcctcgcctactctgcctctctgtcccccagctccagctccagcaaacctgttctcagattgttccatttttctctgtgtccccttcaggcttctgcagtctgcctgcgagccccagtctcagagtccctgtcccggctacagagggaccagctgcaaaagtttgctcagtacctcatcagtgagctccctcagcaggtgggtgaggtcggcaccccctcctgcaattagctccgggccaggccgcataacagccttcctgttaggcccaggcctccatgggttcacctaggccgtgttctgcctgcctccgtctctttctccctcagatcctccccacagctcagcgtctcctggacgaactcctgtcttcccagtcaacagccatcaatacagtgtgtggagctccgggtgagtgtggtgagaaagattggcagtaggaagaaagccagcttgtagtacagagcgccatttactcaaggcttgctgttgtcaggcaaatccaggcccctatctctagatgactgactgcctgtcatcctcagaccccacagcagggccctcagcatcggaccagagtacttggtatctggatgaatcgacactcactgacaacatcaaaaagacactgcacaagttctgtggcccctcccctgtggtcttcaggtaaatcggatctctgcatacctgtgtctgtggtggagggggagcgtccctcaggctgatgacagatcctttcttctattcatgcctgtgacccctaccttttattccctgaactggcacagtgcctggcacacagttgtcactaacgaattgatggaagatgatgaccttgtacagtcacagagtggtctgctcttacctagcaagagttccttttcttcttttgatagatcaggaaatggaaacagagaaagattttttaaagagtttttgtggctgggggcggtggctcatacctataatcccagcattttgggaggctgacgtgggcagatcacctgagatcaggagttcgagaccagcctggccaacatggcgaatctccatctctactaaaaaaacaaaaattagccaggcgtggtggcgggcgcctgtaatctcagctacttgggaggctgaggcaggagaattgcttgaacccgggaggtggaggttgcagtgaggtgagatcgcgccattgcactcaagcctgggcgacagagcaagacttggtctcaaaaaaaaaaattttgttacagatgtctttttccctctatcttctgtattttggggccggaagcccttttaggtttcattcagccccgtcttactgtcatggttttctgttcctctgcttttacagtgatgtgaactccatgtatctgtcttccacggagccgccagccgctgctgaatgggcatgtctgctgcgccctctgaggggccgtgagccagagggcgtctggaacctgctaagcattgtgcgggagatgttcaagcggagggacagcaatgctgcccccttgttggaaatcctcactgaccagtgcctcacctatgaacaggtaatcactcagcgttggggagccccgtggtagctcattctttccctccccctgcctcatcctcctcttgctgaaatggactctgggagggctactctgcctttctctgagctctcaggtgcagctcacagccttctttgtctccagataacaggttggtggtatagcgtacgtacctcagcctcacacagcagtgccagtgggcacacgggccgtagcaacgggcagtcagaggtggcagcccatgcctgtgccagcatgtgtgacgagatggtcacactgtggaggctggccgtgctggaccctgcactcagcccccagcggtgagtctcccctgaggctcaccacagaactgagcctgggccagctcaggacagactgagccttcatctccttgtttgcagagacataccatgattttagtcctcgggaaacgggaggtgctgagcactggtgttagcagtgatttacgagtcctttttctgagaggctttcatccttccttcccctaaataacacccacttttcaaaattctccagtgtttcagtgatgcttatggggctgggtcaagaagtactttcctgtatcctttccccatgcctctctttggggtgtacacctactccatgcccatcctttcccagtagcccctcagcagcctcctgccccttgttcccacaggcgccgggaactgtgtacgcagctgcggcagtggcaactgaaggtgattgagaacgtcaagcggggccaacacaagaagacgctggagcggctcttccccggcttccggccagcggtggaggcctgctacttcaactgggaagaggcctacccacttcctggtgtcacctacagcggcactgacaggaagctggcactgtgctgggcccgggccctgccctctcggccaggtgcctcccgctctgggggcctggaggaatcccgggaccggccccgaccccttcctactgagccagctgtgcggcccaaggagcctgggaccaagcgaaagggcttgggtgagggggtcccctcatcacagcggggtccccgccgcctctcagctgaagggggagataaagctctacataagatgggtccaggtgggggcaaagccaaggcactgggtggggctggcagtgggagcaagggctcagcaggtggcggaagcaagcgacggctgagcagcgaagacagctccctggagccagacctggccgagatgagcctggatgacagcagcctggccctgggcgcagaggccagcaccttcgggggattccctgagagccctccaccctgtcctctccacggtggctcccgaggcccttccactttccttcctgagcccccagatacttatgaagaagatggtggtgtgtacttctcggaagggcctgagcctcccacagcctctgttggcccccctggcctactgcctggggatgtctgtacccaggacgacctcccttctacagatgagagtggcaatgggcttcccaaaaccaaagaggcagcccctgcagttggagaggaggatgatgactaccaggcgtactatctgaatgcccaggatggggctgggggcgaggaagagaaggccgagggcggggctggggaggagcacgacctgtttgctgggctgaagccactggaacaggagagtcgcatggaggtgaggggatggaaggagggagggctgggtgctccttagccacaactgggaggggctatctagctctagttgggagtgtcaggaccatcagcaggattgtgagaaccctgttgcaggcgccgaactggtctccctgctttcagtctactcacttttctgcttccacgagattttcctgaaatgtgatggtgtcactctgctgcttaaaacccttcaatgggttcctgttgcccttatgataaaatgaaagtggttggcatgacctgtgagggtccacttgatctggtctttgcctgctttgccagcctcacttggctgctctgtcctttgcactccagtcagctgaatcactcatgtatctgccatgctctctctcttgcctccaggattttggacagattgacctttctgcctggaatgctcttccccattagcccgtgtttctccttcaggtctcagggatcttaaagatcacttcctctagggagtctctctgatactgtccctgtgccccaagatatcccacctgcttccccttgacctttccctgtaatagctggcatcacggtggcatgtgtgtttatgtgtctgtctttctaaccagagctcctatggagcggcacagggcctggcatgtagcaagtgttcaaggaatgttggctgcatgagtgagcatgatgtcctgctcctggaagttgggactttaacctgtctggtcccatgtcctccttccaggtactgtttgcctgtgctgaggccctgcatgcgcatggctatagcagtgaggcctcccgtctcactgtggagcttgcccaggatctgctagccaacccacccgacctcaaggtagagccgccccctgccaaggtgagagacccccttcctctaccttcccctcccccacttacccccaacctgctcccatgccccaccccaagtgagagcatccttctacctccaccaaggtaagtcagaatcatctgcctgtctcctgtgtttcttccctttctagggcaagaagaacaaggtatccacgagccgtcagacctgggtggctaccaacaccctgagcaaggcggccttcctgttgacagtgctaagtgagcgtccagagcaccacaacctggccttccgagttggcatgtttgccttggagctacagaggcctccagcttctaccaaggccttggaggtcagaggctccatctcagccttgtatttcagtctctttagagccttgcaccttgatctctattgacacaccagaggtctgagctccttcctgtgccctcaggtgaagctggcataccaggagtctgaggtggctgccctgctcaagaagatccctctgggtccaagtgagatgagtaccatgcggtgccgggcagaggaacttcgggaggggacactctgtgactatcggcctgtgttgcctctcatgctggccagtttcatctttgacgttctctgtgctccaggtatgatgcctgaccctacagtaagtggggaactggggtaggggtagctttctctaagaaagaccaagagccccaagtttctgaatcacctttaggacccatcaggcagcttcatgggtaggtctgtgatgatgaggattttgggttcccctgtattttttcccatgcatgatacttctgtctgcctgacttaccccaacttttatacagtggtttctcccacaggttcccggcccccaagtcgcaactggaacagcgagacacctggggatgaggagcttggatttgaagcagcagttgctgccttgggtgagtcttgagcatatcaacgagctaagcctggttcaggtcttgaaggacatgagacctgtgccttgttgtgaagggctgtatggtaatgggaaggtcaggatgacatgtgtgagccaactagtgcctgtaagacaggaattcagggcaaaaatgtgtgctatatggctgggcgtggtggcccatgcttgtaatcgcagcgctttgggaggctgaagcaggaggattgtttgagctcaggagttcatgaccagcctgggcaacctagcaagacctcatctttacttaaaaaaaaaaaaaaaaaaaaaaaaaaaattagccaggtgtggtggcacatgccttgtgctgccagctactccagaggctgaagtgggagaattgctttagcctggagattgaggctgcagtgaactgtgattgcaccactgccctctagcctgggcaacagagtgaaaccttgtctcaaacaaagaaaaaaaaaattgtgtgctatgggtattgggtattgtaagggcagcaaaacaaaaatctagagaaaggcctaagggaagtggtagaatatggaatgtgggttaaaagatcagtaggtcctaaaccagcgaacaccatgagtaaatacacaacgcaatcaagttttcatgagaatgaggaggccagcttccctaaaatgataagtacatgctgggtaagcagattggacctggttatgaaggttttgaaaagcacaccagagcttaggctggatataatagtcaacgaagacttctataggtgatgtgggttggaccaagggaaccccttacttcatatgctgatggcttgggaaccctggcctcttacctttgctgtcttgggaattatgactactctcaatccccataaggtcctctttctcgcaggcatgaagacaacagtgagcgaggcagaacatcccctcttatgtgaaggcacacgtcgggagaagggtgacctggcattagcactaatgatcacttacaaggacgaccaggccaagcttaagaaggtaagagactggggctgggtgcggtggctcatgcctgtaatcccagcagtttgggaggcagaggcgggcagatggcttgagcccaggagtttgagacaagcctgggcaacatggcgaaaccccgtctctaccaaaaaatacaaaaaattagcagctgggtgtggtggcacatgcctgtagtcccagctactcgggaggctgaggtgggaggattgcttgaacccagtaggcagaggttgcaatgagctgggttcacgccactgcactccagcctgggtgacagagcaagaccctgtttcaaaaaaaaaaaaaaaaaaaaaaggcaaggtactggggcctttgacaggcagagaaagagagcacattttactacctttctcagggagtttccagtacaatgagaaaagtgctattttaggctgggtgcagtggctcatgcctgtaatctcagcactttgggaagcagaggcgggaggatcgtttgagaccaacctggccaacatagtgagaccctgtctctacaaaaaattagaaaattagccgggcatggtggcgcgcgcctgtagtcccagctactcgggaggctgaggtgggagaattgcttgagcccaggagtttgaggctacagtgagctataatcataccactgcactccagcctgggcaacagagcgagaccctgtctcttaaaaaaaaaagaagaagaagaaaaaaagaaaagtgctcttctgcccataggaggtaagtagggaatcttggggacatctcataaagaataagagaagaccaatggttcttataggagtgcttgggcatggggtggaagaagagaagcagagggcataaagtcattcattcacttatttcagtatttattgactatcagtatattctgccctgtggtgttaatggaggataccaagatatgttggggttaaataagttacaaaaagacatgtaaaccaggaggtcatcctgtggttgtaagtggggaaggctccctgaggatgtagcaattggctgtttcaaggagaaaggaaggtaatagaagtcaggagctaaagggcatcctgtcactgcttctctggaggtcactgcttctgtcttccagatcttagacaaactcttggaccgagagagccagacacataagccacagacgctgagttctttctactcatctagccgcccaaccacagccagccagaggtctccttcaaagcacgggggcccatctgccccaggggccctgcaaccactgacctcaggctctgcagggcctgctcaaccagggagtgtggcaggggctgggccaggccccactgagggcttcacagagaagaatgtgcctggtgaggtgggggcactgggcaggggggatgaatggtgtggacctatgttgaggtcccctttcctgggctcatcccagcgtcctgttttcctcacctagagagttccccacattccccctgtgagggtcttccatctgaggcagctttgaccccaaggccagaagggaaggttcctagccgcttggcacttggcagtcgtggaggctataatggacggggatgggggtccccaggacggcctaagaagaagcacacaggtaggatagcctgtgggctagcatagagggaaggataatcctgaaggttggagtcttaacatctgggactcctgacttctgagactgacttctcttgggggttaggcatggccagcattgacagcagtgcccctgaaacaacatcggatagttcccccaccttaagccggagaccacttcgagggggctgggcccccacctcctggggtcgaggtcaggacagtgacagcattagcagctcttcttcggactccctgggctcctcatcctccagtggaagtcgccgggccagtgccagtggaggagcccgggcgaagactgttgaagttggcaggtcagtgggaagaactccccatcttccctgatctggcccaccctcagagccacacccctagtgcaatccaaccattgtctcccagcatcctcactttccctggtccttcccaacctacccggatgcccatttcaaagaaaccccaacccccgtccctaccccattgccccttcaggtacaagggccgccgccccgagagtcatgcccctcatgtacccaatcagccatcagaggcagctgcacacttctacttcgagctggcgaagacagtgctgatcaaggcagggggcaacagcagcacttccattttcacacatccatcttcctcagggggccaccagggtcctcaccgcaacctgcacctttgcgccttcgagattgggctttatgcccttggcctgcacaactttgtttctcccaactggctctcacgtacttattcttcccacgtttcctggattacaggtaaatcatttgacctgacttgggtatgggagggggattaattggtggggataagacccttatctttgtggggttactgatctgataaaaagacattattctcacaccccagtggtgcccacactaacccaactctgcccttctctcctttcccctaaggccaggccatggagataggcagcgcagccctgactatactggtagaatgctgggatgggcacctgacaccccctgaggttgcatccctggctgacagggcatcacgggcaagagactccaatatggtgagggcggcagcagagctggccctgagctgcctgcctcacgcccatgcattgaaccctaatgagatccagcgggccctggtgcagtgcaaggaacaggtatttctacgggcaatctgggaacctcttctggggcatctgggcagggaggttgggcatgggaaagctaagggcccagctcttgattcccgtatcctggagtttacagatgattgttggtcctctcatggcaacattttacccattaatgtgctttcacacccatctttcctttaccttacaactcaaaggttaggtttatttctattttacagataaggaaatggaggcctacggtttagggaccaagatgatcactcaggatagaaaacttagggaaggcctcatacatctaagacttgaatgggagggggctgttaaattagtttggaactgggactataacctgggtcttgactcattttggtcagtatttactcagtgtgtgaagcactcactgctctgataatggactctaagcattgacactgacctctgatgattccctgggaatgagacagctctgagggagacattggaatctcatctaacaccttccatgtggtaaaggcctttcccccttaacactctgtgcccctctcttccaggacaacctgatgttggagaaggcctgcatggcagtggaagaggcagctaagggtgggggcgtgtaccctgaagtgttgtttgaggttgctcaccagtggttctggctgtatgagcaaactgcaggtggctcatccacagcccgtgaaggggctacaagctgtagtgccagtgggatcagggcaggtggggaagctgggcggggtatgcctgagggtagagggggcccagggactgagccggttacagtggcagcggcagcagtgacagcagcagccacagtggtgcccgtcatatcggtggggtctagtttatacccgggtccaggactggggcatggccactcccctggcctgcacccctacactgctctacagccccacctgccctgtagccctcagtatctcactcacccagctcaccctgcccaccccatgcctcacatgccccggcctgccgtcttccctgtgcccagctctgcatacccacaggtgagaccagtgttctgctggggggtaaggcatgggaaaatactgggaattcatagggggttggagtgggtactctgggagtataattggtcagtcggagagtcctggtgaggtggtgggagtctgggggacccagcccaactaaaataagaaatgacggccgggcatggtggctcatgcctgtaatcccagcactttgagaggccgatgtgggtggatcacttgaggtcaggagttcgagaccagcctggccaacatggggaaaccccgtctctactaaaaattagctgagtgcacgcctgtaatcccagcttcttgggaggctgagatgggaatcacttgaacctgggaggcagaggttgcagtgagccgatatcgtgccactgcactccagcctggaggacagagcgagactctatctcaaaaaaaacatgtcaggatagcagcttgtgggggtgaagcacgacagcaacatcctaatcaagtttggcatcttcccctttcttctccctgcccctagggtgtgcatcctgcattcctaggggctcagtacccttattcagtgactcctccctcacttgctgccactgctgtgtctttccccgttccttccatggcacccatcacagtacatccctaccacacagagccagggcttccactgcccaccagtgtggcctgtgagttgtggggccagggaacaggtgaatggaggggaggcacactgggcaggggaggtggggagggaatgttctttgtctctctttgggctctgagttcctcacatggctctcaccccacttagtgagcagtgtccatccagcatccacgtttccagccatccaaggtgcctcactgcctgccctgaccacacagcccagccctctggtgagcggaggttttccaccgcccgaggaggagacacacagtcagccagtcaatccccacagcctgcaccacctgcatgctgcctaccgtgtcggtgagaggacatccctttctgtgctcctacctgcagttgtgccagtggctcttgcagaggacccttcctctagctcttcatttgtttactgtggggtcaggtgacaggttggggtaaagggtgaagaggatacaccgtaccatgtgcccacccttatctatctcccaggaatgctggcactggagatgctgggtcgccgggcacacaacgatcaccccaacaacttctcccgctcccccccctacactgatgatgtcaaatggttgctggggctggcagcaaagctgggtaacacctcccctccctaggaccattgccccccccccacctgctctccccaccttccttatcccagacctccttcctagctcttgctcagagttgaggccttggtcgggtatgtgtgcgtgcgcggggggcggagggttacctcagctcctggggtggagggaggctctctgccaggccagagctgagatctgtaagttgggtccctagggcagaggtggccacccccgtctcatgcccctccccctgccccccaggagtgaactacgtgcaccagttctgtgtgggggcagccaagggggtgctgagcccgtttgtgctgcaggagatcgtcatggagacgctgcagcggctgagtcccgctcatgcccacaaccacctgcgtgccccggccttccaccaactggtgcagcgctgccagcaggcatacatgcaggtgacaacctagaattatggagcagggtggagcacttcctgggtggtcttggaccagagggaggcagggcctgtttctgtgctttgtactaaggctcatcctgcacacatcctcctccagtacatccaccaccgcttgattcacctgactcctgcggactacgacgactttgtgaatgcgatccggagtgcccgcagcgccttctgcctgacgcccatgggcatgatgcagttcaacgacatcctacagaacctcaagcgcagcaaacagaccaaggagctgtggcagcgggtctcactcgagatggccaccttctccccctgagtctttcacccttagggtcctatacagggacccaggcctgtggctatgggggcccctcacacagggggagtgaaacttggctggacagatcatcctcactcagttccctggtagcacagactgacagctgctcttgggctatagcttggggccaagatgtctcacaccctagaagcctagggctgggggagacagccctgtctgggagggggcgttgggtggcctctggtatttatttggcatttataaatatataaactccttttttactctagtcga

SEQ ID NO: 1996 - DNA, 13076 bp, Homo sapiens
atcccatttgaagtggtggagaaagtttacccaccagtgcctgagcagctacagctccgaattgctttttggagcttccctgagaatgaagaggacattcggtgaggccaaaggactgatggtggggagcggggtcctgatactccacactgtctgctgggtttcccatagaacaaaggagacattgtatttggggcagtggtaagaggaagacaagggagggattgcctgggattccactccctcccccccaccccccgccctggggaaggaatgaggctagggagagagtgcctagggcattgtggtctctgacagggtctgccaaaggttatttgctgagttgtggctgtgtcctcttcttcacccccaggctgtattcgtgcctggccaatggcagtgcggatgagtttcagcgaggggatcagctcttccgcatgcgggctgtgaaggacccattgcagataggtgagtgggccatcatgccatgtggcacatcctgctcctcccatcccctggcttatgaagtaagaacacaccgcaagaagctggagcatgttgtctgaataactgcagggccagggtcaagggcagagacccaggtcctgacagcactccctgaccatgcccccatttctccccagggttccacctgagtgctacagtggtgccacctcagatggtccctcctaaaggggcctacaacgtggctgtgatgtttgaccgctgccgggtcacttcctgcagctgtacctgtggggctggggccaaatggtgcacccacgtcgtggcactctgtctcttccgcatccacaacgtgaggccctcccaatttatcccggccctatcctacactccatcccccccttctctgctgcatgcctggctacaatgtgagccccctcgcctcgcctactctgcctctctgtcccccagctccagctccagcaaacctgttctcagattgttccatttttctctgtgtccccttcaggcttctgcagtctgcctgcgagccccagtctcagagtccctgtcccggctacagagggaccagctgcaaaagtttgctcagtacctcatcagtgagctccctcagcaggtgggtgaggtcggcaccccctcctgcaattagctccgggccaggccgcataacagccttcctgttaggcccaggcctccatgggttcacctaggccgtgttctgcctgcctccgtctctttctccctcagatcctccccacagctcagcgtctcctggacgaactcctgtcttcccagtcaacagccatcaatacagtgtgtggagctccgggtgagtgtggtgagaaagattggcagtaggaagaaagccagcttgtagtacagagcgccatttactcaaggcttgctgttgtcaggcaaatccaggcccctatctctagatgactgactgcctgtcatcctcagaccccacagcagggccctcagcatcggaccagagtacttggtatctggatgaatcgacactcactgacaacatcaaaaagacactgcacaagttctgtggcccctcccctgtggtcttcaggtaaatcggatctctgcatacctgtgtctgtggtggagggggagcgtccctcaggctgatgacagatcctttcttctattcatgcctgtgacccctaccttttattccctgaactggcacagtgcctggcacacagttgtcactaacgaattgatggaagatgatgaccttgtacagtcacagagtggtctgctcttacctagcaagagttccttttcttcttttgatagatcaggaaatggaaacagagaaagattttttaaagagtttttgtggctgggggcggtggctcatacctataatcccagcattttgggaggctgacgtgggcagatcacctgagatcaggagttcgagaccagcctggccaacatggcgaatctccatctctactaaaaaaacaaaaattagccaggcgtggtggcgggcgcctgtaatctcagctacttgggaggctgaggcaggagaattgcttgaacccgggaggtggaggttgcagtgaggtgagatcgcgccattgcactcaagcctgggcgacagagcaagacttggtctcaaaaaaaaaaattttgttacagatgtctttttccctctatcttctgtattttggggccggaagcccttttaggtttcattcagccccgtcttactgtcatggttttctgttcctctgcttttacagtgatgtgaactccatgtatctgtcttccacggagccgccagccgctgctgaatgggcatgtctgctgcgccctctgaggggccgtgagccagagggcgtctggaacctgctaagcattgtgcgggagatgttcaagcggagggacagcaatgctgcccccttgttggaaatcctcactgaccagtgcctcacctatgaacaggtaatcactcagcgttggggagccccgtggtagctcattctttccctccccctgcctcatcctcctcttgctgaaatggactctgggagggctactctgcctttctctgagctctcaggtgcagctcacagccttctttgtctccagataacaggttggtggtatagcgtacgtacctcagcctcacacagcagtgccagtgggcacacgggccgtagcaacgggcagtcagaggtggcagcccatgcctgtgccagcatgtgtgacgagatggtcacactgtggaggctggccgtgctggaccctgcactcagcccccagcggtgagtctcccctgaggctcaccacagaactgagcctgggccagctcaggacagactgagccttcatctccttgtttgcagagacataccatgattttagtcctcgggaaacgggaggtgctgagcactggtgttagcagtgatttacgagtcctttttctgagaggctttcatccttccttcccctaaataacacccacttttcaaaattctccagtgtttcagtgatgcttatggggctgggtcaagaagtactttcctgtatcctttccccatgcctctctttggggtgtacacctactccatgcccatcctttcccagtagcccctcagcagcctcctgccccttgttcccacaggcgccgggaactgtgtacgcagctgcggcagtggcaactgaaggtgattgagaacgtcaagcggggccaacacaagaagacgctggagcggctcttccccggcttccggccagcggtggaggcctgctacttcaactgggaagaggcctacccacttcctggtgtcacctacagcggcactgacaggaagctggcactgtgctgggcccgggccctgccctctcggccaggtgcctcccgctctgggggcctggaggaatcccgggaccggccccgaccccttcctactgagccagctgtgcggcccaaggagcctgggaccaagcgaaagggcttgggtgagggggtcccctcatcacagcggggtccccgccgcctctcagctgaagggggagataaagctctacataagatgggtccaggtgggggcaaagccaaggcactgggtggggctggcagtgggagcaagggctcagcaggtggcggaagcaagcgacggctgagcagcgaagacagctccctggagccagacctggccgagatgagcctggatgacagcagcctggccctgggcgcagaggccagcaccttcgggggattccctgagagccctccaccctgtcctctccacggtggctcccgaggcccttccactttccttcctgagcccccagatacttatgaagaagatggtggtgtgtacttctcggaagggcctgagcctcccacagcctctgttggcccccctggcctactgcctggggatgtctgtacccaggacgacctcccttctacagatgagagtggcaatgggcttcccaaaaccaaagaggcagcccctgcagttggagaggaggatgatgactaccaggcgtactatctgaatgcccaggatggggctgggggcgaggaagagaaggccgagggcggggctggggaggagcacgacctgtttgctgggctgaagccactggaacaggagagtcgcatggaggtgaggggatggaaggagggagggctgggtgctccttagccacaactgggaggggctatctagctctagttgggagtgtcaggaccatcagcaggattgtgagaaccctgttgcaggcgccgaactggtctccctgctttcagtctactcacttttctgcttccacgagattttcctgaaatgtgatggtgtcactctgctgcttaaaacccttcaatgggttcctgttgcccttatgataaaatgaaagtggttggcatgacctgtgagggtccacttgatctggtctttgcctgctttgccagcctcacttggctgctctgtcctttgcactccagtcagctgaatcactcatgtatctgccatgctctctctcttgcctccaggattttggacagattgacctttctgcctggaatgctcttccccattagcccgtgtttctccttcaggtctcagggatcttaaagatcacttcctctagggagtctctctgatactgtccctgtgccccaagatatcccacctgcttccccttgacctttccctgtaatagctggcatcacggtggcatgtgtgtttatgtgtctgtctttctaaccagagctcctatggagcggcacagggcctggcatgtagcaagtgttcaaggaatgttggctgcatgagtgagcatgatgtcctgctcctggaagttgggactttaacctgtctggtcccatgtcctccttccaggtactgtttgcctgtgctgaggccctgcatgcgcatggctatagcagtgaggcctcccgtctcactgtggagcttgcccaggatctgctagccaacccacccgacctcaaggtagagccgccccctgccaaggtgagagacccccttcctctaccttcccctcccccacttacccccaacctgctcccatgccccaccccaagtgagagcatccttctacctccaccaaggtaagtcagaatcatctgcctgtctcctgtgtttcttccctttctagggcaagaagaacaaggtatccacgagccgtcagacctgggtggctaccaacaccctgagcaaggcggccttcctgttgacagtgctaagtgagcgtccagagcaccacaacctggccttccgagttggcatgtttgccttggagctacagaggcctccagcttctaccaaggccttggaggtcagaggctccatctcagccttgtatttcagtctctttagagccttgcaccttgatctctattgacacaccagaggtctgagctccttcctgtgccctcaggtgaagctggcataccaggagtctgaggtggctgccctgctcaagaagatccctctgggtccaagtgagatgagtaccatgcggtgccgggcagaggaacttcgggaggggacactctgtgactatcggcctgtgttgcctctcatgctggccagtttcatctttgacgttctctgtgctccaggtatgatgcctgaccctacagtaagtggggaactggggtaggggtagctttctctaagaaagaccaagagccccaagtttctgaatcacctttaggacccatcaggcagcttcatgggtaggtctgtgatgatgaggattttgggttcccctgtattttttcccatgcatgatacttctgtctgcctgacttaccccaacttttatacagtggtttctcccacaggttcccggcccccaagtcgcaactggaacagcgagacacctggggatgaggagcttggatttgaagcagcagttgctgccttgggtgagtcttgagcatatcaacgagctaagcctggttcaggtcttgaaggacatgagacctgtgccttgttgtgaagggctgtatggtaatgggaaggtcaggatgacatgtgtgagccaactagtgcctgtaagacaggaattcagggcaaaaatgtgtgctatatggctgggcgtggtggcccatgcttgtaatcgcagcgctttgggaggctgaagcaggaggattgtttgagctcaggagttcatgaccagcctgggcaacctagcaagacctcatctctacttaaaaaaaaaaaaaaaaaaaaaaaaaaaattagccaggtgtggtggcacatgccttgtgctgccagctactccagaggctgaagtgggagaattgctttagcctggagattgaggctgcagtgaactgtgattgcaccactgccctctagcctgggcaacagagtgaaaccttgtctcaaacaaagaaaaaaaaaattgtgtgctatgggtattgggtattgtaagggcagcaaaacaaaaatctagagaaaggcctaagggaagtggtagaatatggaatgtgggttaaaagatcagtaggtcctaaaccagcgaacaccatgagtaaatacacaacgcaatcaagttttcatgagaatgaggaggccagcttccctaaaatgataagtacatgctgggtaagcagattggacctggttatgaaggttttgaaaagcacaccagagcttaggctggatataatagtcaacgaagacttctataggtgatgtgggttggaccaagggaaccccttacttcatatgctgatggcttgggaaccctggcctcttacctttgctgtcttgggaattatgactactctcaatccccataaggtcctctttctcgcaggcatgaagacaacagtgagcgaggcagaacatcccctcttatgtgaaggcacacgtcgggagaagggtgacctggcattagcactaatgatcacttacaaggacgaccaggccaagcttaagaaggtaagagactggggctgggtgcggtggctcatgcctgtaatcccagcagtttgggaggcagaggcgggcagatggcttgagcccaggagtttgagacaagcctgggcaacatggcgaaaccccgtctctaccaaaaaatacaaaaaattagcagctgggtgtggtggcacatgcctgtagtcccagctactcgggaggctgaggtgggaggattgcttgaacccagtaggcagaggttgcaatgagctgggttcacgccactgcactccagcctgggtgacagagcaagaccctgtttcaaaaaaaaaaaaaaaaaaaaaaggcaaggtactggggcctttgacaggcagagaaagagagcacattttactacctttctcagggagtttccagtacaatgagaaaagtgctattttaggctgggtgcagtggctcatgcctgtaatctcagcactttgggaagcagaggcgggaggatcgtttgagaccaacctggccaacatagtgagaccctgtctctacaaaaaattagaaaattagccgggcatggtggcgcgcgcctgtagtcccagctactcgggaggctgaggtgggagaattgcttgagcccaggagtttgaggctacagtgagctataatcataccactgcactccagcctgggcaacagagcgagaccctgtctcttaaaaaaaaaagaagaagaagaaaaaaagaaaagtgctcttctgcccataggaggtaagtagggaatcttggggacatctcataaagaataagagaagaccaatggttcttataggagtgcttgggcatggggtggaagaagagaagcagagggcataaagtcattcattcacttatttcagtatttattgactatcagtatattctgccctgtggtgttaatggaggataccaagatatgttggggttaaataagttacaaaaagacatgtaaaccaggaggtcatcctgtggttgtaagtggggaaggctccctgaggatgtagcaattggctgtttcaaggagaaaggaaggtaatagaagtcaggagctaaagggcatcctgtcactgcttctctggaggtcactgcttctgtcttccagatcttagacaaactcttggaccgagagagccagacacataagccacagacgctgagttctttctactcatctagccgcccaaccacagccagccagaggtctccttcaaagcacgggggcccatctgccccaggggccctgcaaccactgacctcaggctctgcagggcctgctcaaccagggagtgtggcaggggctgggccaggccccactgagggcttcacagagaagaatgtgcctggtgaggtgggggcactgggcaggggggatgaatggtgtggacctatgttgaggtcccctttcctgggctcatcccagcgtcctgttttcctcacctagagagttccccacattccccctgtgagggtcttccatctgaggcagctttgaccccaaggccagaagggaaggttcctagccgcttggcacttggcagtcgtggaggctataatggacggggatgggggtccccaggacggcctaagaagaagcacacaggtaggatagcctgtgggctagcatagagggaaggataatcctgaaggttggagtcttaacatctgggactcctgacttctgagactgacttctcttgggggttaggcatggccagcattgacagcagtgcccctgaaacaacatcggatagttcccccaccttaagccggagaccacttcgagggggctgggcccccacctcctggggtcgaggtcaggacagtgacagcattagcagctcttcttcggactccctgggctcctcatcctccagtggaagtcgccgggccagtgccagtggaggagcccgggcgaagactgttgaagttggcaggtcagtgggaagaactccccatcttccctgatctggcccaccctcagagccacacccctagtgcaatccaaccattgtctcccagcatcctcactttccctggtccttcccaacctacccggatgcccatttcaaagaaaccccaacccccgtccctaccccattgccccttcaggtacaagggccgccgccccgagagtcatgcccctcatgtacccaatcagccatcagaggcagctgcacacttctacttcgagctggcgaagacagtgctgatcaaggcagggggcaacagcagcacttccattttcacacatccatcttcctcagggggccaccagggtcctcaccgcaacctgcacctttgcgccttcgagattgggctttatgcccttggcctgcacaactttgtttctcccaactggctctcacgtacttattcttcccacgtttcctggattacaggtaaatcatttgacctgacttgggtatgggagggggattaattggtggggataagacccttatctttgtggggttactgatctgataaaaagacattattctcacaccccagtggtgcccacactaacccaactctgcccttctctcctttcccctaaggccaggccatggagataggcagcgcagccctgactatactggtagaatgctgggatgggcacctgacaccccctgaggttgcatccctggctgacagggcatcacgggcaagagactccaatatggtgagggcggcagcagagctggccctgagctgcctgcctcacgcccatgcattgaaccctaatgagatccagcgggccctggtgcagtgcaaggaacaggtatttctacgggcaatctgggaacctcttctggggcatctgggcagggaggttgggcatgggaaagctaagggcccagctcttgattcccgtatcctggagtttacagatgattgttggtcctctcatggcaacattttacccattaatgtgctttcacacccatctttcctttaccttacaactcaaaggttaggtttatttctattttacagataaggaaatggaggcctacggtttagggaccaagatgatcactcaggatagaaaacttagggaaggcctcatacatctaagacttgaatgggagggggctgttaaattagtttggaactgggactataacctgggtcttgactcattttggtcagtatttactcagtgtgtgaagcactcactgctctgataatggactctaagcattgacactgacctctgatgattccctgggaatgagacagctctgagggagacattggaatctcatctaacaccttccatgtggtaaaggcctttcccccttaacactctgtgcccctctcttccaggacaacctgatgttggagaaggcctgcatggcagtggaagaggcagctaagggtgggggcgtgtaccctgaagtgttgtttgaggttgctcaccagtggttctggctgtatgagcaaactgcaggtggctcatccacagcccgtgaaggggctacaagctgtagtgccagtgggatcagggcaggtggggaagctgggcggggtatgcctgagggtagagggggcccagggactgagccggttacagtggcagcggcagcagtgacagcagcagccacagtggtgcccgtcatatcggtggggtctagtttatacccgggtccaggactggggcatggccactcccctggcctgcacccctacactgctctacagccccacctgccctgtagccctcagtatctcactcacccagctcaccctgcccaccccatgcctcacatgccccggcctgccgtcttccctgtgcccagctctgcatacccacaggtgagaccagtgttctgctggggggtaaggcatgggaaaatactgggaattcatagggggttggagtgggtactctgggagtataattggtcagtcggagagtcctggtgaggtggtgggagtctgggggacccagcccaactaaaataagaaatgacggccgggcatggtggctcatgcctgtaatcccagcactttgagaggccgatgtgggtggatcacttgaggtcaggagttcgagaccagcctggccaacatggggaaaccccgtctctactaaaaattagctgagtgcacgcctgtaatcccagcttcttgggaggctgagatgggaatcacttgaacctgggaggcagaggttgcagtgagccgatatcgtgccactgcactccagcctggaggacagagcgagactctatctcaaaaaaaacatgtcaggatagcagcttgtgggggtgaagcacgacagcaacatcctaatcaagtttggcatcttcccctttcttctccctgcccctagggtgtgcatcctgcattcctaggggctcagtacccttattcagtgactcctccctcacttgctgccactgctgtgtctttccccgttccttccatggcacccatcacagtacatccctaccacacagagccagggcttccactgcccaccagtgtggcctgtgagttgtggggccagggaacaggtgaatggaggggaggcacactgggcaggggaggtggggagggaatgttctttgtctctctttgggctctgagttcctcacatggctctcaccccacttagtgagcagtgtccatccagcatccacgtttccagccatccaaggtgcctcactgcctgccctgaccacacagcccagccctctggtgagcggaggttttccaccgcccgaggaggagacacacagtcagccagtcaatccccacagcctgcaccacctgcatgctgcctaccgtgtcggtgagaggacatccctttctgtgctcctacctgcagttgtgccagtggctcttcagaggacccttcctctagctcttcatttgtttactgtggggtcaggtgacaggttggggtaaagggtgaagaggatacaccgtaccatgtgcccacccttatctatctcccaggaatgctggcactggagatgctgggtcgccgggcacacaacgatcaccccaacaacttctcccgctcccccccctacactgatgatgtcaaatggttgctggggctggcagcaaagctgggtaacacctcccctccctaggaccattgccccccccccacctgctctccccaccttccttatcccagacctccttcctagctcttgctcagagttgaggccttggtcgggtatgtgtgcgtgcgcggggggcggagggttacctcagctcctggggtggagggaggctctctgccaggccagagctgagatctgtaagttgggtccctagggcagaggtggccacccccgtctcatgcccctccccctgccccccaggagtgaactacgtgcaccagttctgtgtgggggcagccaagggggtgctgagcccgtttgtgctgcaggagatcgtcatggagacgctgcagcggctgagtcccgctcatgcccacaaccacctgcgtgccccggccttccaccaactggtgcagcgctgccagcaggcatacatgcaggtgacaacctagaattatggagcagggtggagcacttcctgggtggtcttggaccagagggaggcagggcctgtttctgtgctttgtactaaggctcatcctgcacacatcctcctccagtacatccaccaccgcttgattcacctgactcctgcggactacgacgactttgtgaatgcgatccggagtgcccgcagcgccttctgcctgacgcccatgggcatgatgcagttcaacgacatcctacagaacctcaagcgcagcaaacagaccaaggagctgtggcagcgggtctcactcgagatggccaccttctccccctgagtctttcacccttagggtcctatacagggacccaggcctgtggctatgggggcccctcacacagggggagtgaaacttggctggacagatcatcctcactcagttccctggtagcacagactgacagctgctcttgggctatagcttggggccaagatgtctcacaccctagaagcctagggctgggggagacagccctgtctgggagggggcgttgggtggcctctggtatttatttggcatttataaatatataaactccttttttactctagtcga

SEQ ID NO: 1997 - DNA, 207 bp, Homo sapiens
ccttgagtggtaactttatcttagtccaggtgattccagttgcagcagtagctaggtgccctgcgataactctctccccttgagggtttccagtgtgggaagttgtcatttaggcgcgccaaaagtggtctggcctctcgtgcttcttgagatcccttccgggctctggtctatcttgtctccttagctgggggcctacagtcatct

SEQ ID NO: 1998 - DNA, 2124 bp, Homo sapiens
aaacagaaaaataaggatgtttattaaggacatttctagcccacagctagggctcatactcggctctatgagccactgtccgacctcatccccattcaatgtgaatgacattagggaggccgggccacaggtagatcccactgcctggctaaaggggccatagcaaggggtccctcccatgcaaggggtctctcccatagccaggtatagaatagatacactgctgcggatgaagagggaaatctcattggactaatacattcccctacaccctgcctggaccctctcattcctccccacctcccaagatgatgggtcaaaggtacctagcactattatgtggggtaccaaaggaagcccctttatttgtcccagaactgtgggaaaaggatacccttcccttctcagccatctcaggcctgggggctactgaggtagagggggaggggccaggccactctaatcccccttgtgggccctgctctggacctgccccttagggaagcagggggcattttgctggtatgggaggctgggacatcagcccagactggaatgctgcagttcttcccgaagccacgagggcactggctgtccaagccggctcagcagcttcgacaactccaaattatggttccggaaaaaatccgtaaggaaaagacgggactgacaggagaaaatgaaggcagaaatggtaagaagtgggacacagaatcagatcctggaagtggagagggattcccctgcccctggctttacttacctcagtgtccatatctggatacctccggcctttgctccggcctagacagcgagtcttaccaccttcaagtccctggcaccaaaatcccttatcatcatcaaacctgctcaacaggaagaggccatgaggtggcagggaaaagagaaactcaagttccataaatgcacaatgcccttccctgcccacagggacatgtctctccttgtgagacagagtaaatctatgtctctaacagacatggtcaacctgcttccccatttcccatacagtactcctcccctgggtcatgctctcccacctgagggtccgtgtgtagttcagaaagggtgtgatacccaggaacttctggatgctctccattgaggctgctgggttggtacgcagctcttgcccatccacaatcagcaactaaaaggacagggatgtggttccctctatattcctaagaagcctctgggctgaagggaagaagaggggaaggggaaccccactgagggctcttgtggggattatacctgtccagaggggtagtaagtcagccagcgttgtagatgggtagaatagtagccagggacaagacagcggttctgcagggagcgtagtgccagaggggtctgggaggaggctgaaatcacctgatagaaggtatagttcagagcaactgggtctccatgggctcgctgatgctgaaggacaaagagaaggaaggtgaaggactggtgatttgacagtattctgcccttacgcttggtctggagacagacagcacagcacgggtacccgtccccaaggcactagttaagtttctcaaacctcactcctttctccctctctagcagtcactgtcccctcccccctccccccaacctttagcctgtgtgtccctagcttcaggcagacctggtaccaggagtaggccctgtcagcagggttggtgagcactgtgatgatcttggctcgtggcaggagggcagccccccgccgtggtacaacttcagagtcaaagtaggtggcacttttttcaaataggaaatcagtgctggcattggaaggaacagggaagaaatccatgtacctaggaagtagcacagaagagagagaagcagaaaaatatgcagagtgaagtggccagaagtctgtgctgagggaagctggaatggggtattttgggggaagggagtgttcctctgagaaacattcaaatggggcccagtctcaccagtcaatacccttgtggtaattagggctgttgaagaactgaatctcctcaaatgtgctggggctagggaagctgctagttacagctgggtgcaggctcaggaagaagtgaatagctgtagtccctaaatgggagagaaaga

SEQ ID NO: 1999 - DNA, 207 bp, Homo sapiens; identical to SEQ ID NO: 1997

SEQ ID NO: 2000 - DNA, 2971 bp, Homo sapiens
aaacagaaaaataaggatgtttattaaggacatttctagcccacagctagggctcatactcggctctatgagccactgtccgacctcatccccattcaatgtgaatgacattagggaggccgggccacaggtagatcccactgcctggctaaaggggccatagcaaggggtccctcccatgcaaggggtctctcccatagccaggtatagaatagatacactgctgcggatgaagagggaaatctcattggactaatacattcccctacaccctgcctggaccctctcattcctccccacctcccaagatgatgggtcaaaggtacctagcactattatgtggggtaccaaaggaagcccctttatttgtcccagaactgtgggaaaaggatacccttcccttctcagccatctcaggcctgggggctactgaggtagagggggaggggccaggccactctaatcccccttgtgggccctgctctggacctgccccttagggaagcagggggcattttgctggtatgggaggctgggacatcagcccagactggaatgctgcagttcttcccgaagccacgagggcactggctgtccaagccggctcagcagcttcgacaactccaaattatggttccggaaaaaatccgtaaggaaaagacgggactgacaggagaaaatgaaggcagaaatggtaagaagtgggacacagaatcagatcctggaagtggagagggattcccctgcccctggctttacttacctcagtgtccatatctggatacctccggcctttgctccggcctagacagcgagtcttaccaccttcaagtccctggcaccaaaatcccttatcatcatcaaacctgctcaacaggaagaggccatgaggtggcagggaaaagagaaactcaagttccataaatgcacaatgcccttccctgcccacagggacatgtctctccttgtgagacagagtaaatctatgtctctaacagacatggtcaacctgcttccccatttcccatacagtactcctcccctgggtcatgctctcccacctgagggtccgtgtgtagttcagaaagggtgtgatacccaggaacttctggatgctctccattgaggctgctgggttggtacgcagctcttgcccatccacaatcagcaactaaaaggacagggatgtggttccctctatattcctaagaagcctctgggctgaagggaagaagaggggaaggggaaccccactgagggctcttgtggggattatacctgtccagaggggtagtaagtcagccagcgttgtagatgggtagaatagtagccagggacaagacagcggttctgcagggagcgtagtgccagaggggtctgggaggaggctgaaatcacctgatagaaggtatagttcagagcaactgggtctccatgggctcgctgatgctgaaggacaaagagaaggaaggtgaaggactggtgatttgacagtattctgcccttacgcttggtctggagacagacagcacagcacgggtacccgtccccaaggcactagttaagtttctcaaacctcactcctttctccctctctagcagtcactgtcccctcccccctccccccaacctttagcctgtgtgtccctagcttcaggcagacctggtaccaggagtaggccctgtcagcagggttggtgagcactgtgatgatcttggctcgtggcaggagggcagccccccgccgtggtacaacttcagagtcaaagtaggtggcacttttttcaaataggaaatcagtgctggcattggaaggaacagggaagaaatccatgtacctaggaagtagcacagaagagagagaagcagaaaaatatgcagagtgaagtggccagaagtctgtgctgagggaagctggaatggggtattttgggggaagggagtgttcctctgagaaacattcaaatggggcccagtctcaccagtcaatacccttgtggtaattagggctgttgaagaactgaatctcctcaaatgtgctggggctagggaagctgctagttacagctgggtgcaggctcaggaagaagtgaatagctgtagtccctaaatgggagagaaagaccagcttcaggcagccattgtgggagggaagccagctcaacagcataagcttgaaggaagtgaaaaaataaccactctgggtaggaaaatcccctatggccaaactacaatgataggaggcaagtctgagagaggcccagggaagggctaaaacagtggttctctgctttaactgtgcaccagaatgacttgtgatcttgtaaaaacaccacagatgattctgatatacaaccagggttaggaatcactgcctcaagagactggatcaatgaggggtgggtataaaaggagttcctttttttctctcttaaaaattcaaattaaggccgggtgcggtggctcatgcctgtaatcccagcactttgggaggccaaggcaggcggatcacttgaggtcaagagttcgagaccagcctggccaacatggtgaaaccccgtctctactaaaaatacaaaaattagccaggtgtggtggcacctgcctgtaatcccagctactagggaagctgagcagaattgcctgaacctgggaggtggaggttgtagtgagctgagatcgtgccactgcgctccagcctgggcaaagaagtgagactcttatctcaaaaaaaaaaaaattattaaaattaaaaatacttttttcactcctgtgattacctggagagagaagagagttccttgacaaaaggatcctttgggtttaaggcagggcaagagaagttagctaaggatacttcacctgttttctggggtcccacaatgaggaacttcgggagacgatcacaggttttctccttggaccagatatctttgtgcctcttgtcatcacagggattctgaagccaggg

SEQ ID NO: 2001 - DNA, 1821 bp, Homo sapiens
cctcgagcctagtagttcaaggttgcagtgagctaggatcgggccactgcactccatcctgggtgacagagtgtgaccctgtctcaaaaacaaacaaaaaacacctttggagaaactgcagctctgtggacacccataatcccaagcagcatgcttggcagtgccctcctcccactgcttctgtctagaaactacacccacgtgggcactccccctacccctaaaaaaccaggccactccaaggaggaaattgtctcaaccagcatctcacagtgaggaaaaatctgcatcacaaattgcaggccaccatgaagtttctggagtaccactgccagcctcttccaggcttgggtaccccttcatcacctcctccagggagcttttcatgacttccccagaataagtcactatgcccatactgatgttcccagtcctgaacccactccttcagcactggcatccaggggctgtgaattttcacttccctgtctctctcatcagactccactcttctacgagaagggaagaatttgcatttattgtaaaatgctgattaggtgctaatcattcgacacccaccatctctaattctcaccacagttctgtgagccggatgttatcattcccactatacacactcaggtgaaatgacctgttcaaggtcaaatccaggtccatatggctcccaagcctgggcagcctctctatggtctgatggtgtctcgtcggctccataagccccactccctgcccacacccccagcacatcacttagaaaatgcccctgggttacagtgccacggtcagatgcacagatgtgtacacatggggtcacagtcactgacctggaaacaaagccactttgcccatgcacttatttctcagcgccagagaacccagggtgcaggaaggcctcggcacaccaccacctccactgccaaggcaacgagctggggccggcacgtggtgagcaagaaaggcaccaagctctggagctggacggaacaaggctcaaatcccagtggtaccaaccacacgctcccgggcaagtgatttccaatccctaagcctccccatttggtcatcataaagatcccccctgcctctggaggctgctacagtttgtgaaaaggagggtatacacaggctccgaataaacggaggctctcgtcccttctccgccttccctgtcactggctccagggtctgagagagcagcaaccttgtttctctggtctgtaaaatggtctgtttctttctggctccactgcgctatggaaatcgtggggttgcggggaggctgcagcttgtcatccagcccccaggcactgactgcagagatcccacccctgacccccccagactgggatgccaggaggggcagaggatctgcacttctgagctgtgtgccttgagccaagcacttgaccgcctgtgctccaggtcccctagctttgagcaggggctaacggaagaacctgccttgccaggttgttgtagtaaatgagtcaacacacgtttcacacttagcacagtgcccagctcccagtaaatgctcaatagatggaagctatgattagtcatggaacacggcctttctgctgtcctccctgccatggaaaatgggtaactcagctggagggcagttcctctgtgtagactggccaaggccccggggatgaggcagggtacctgggtgccaaaccagccccctctgctaccaatgctcggcaacacaccgacagtcaagacacacaggaggacgtcccatctcccttgtatccaattcggcaccatatcccagtgcctggcacaagacct

SEQ ID NO: 2002 - DNA, 1821 bp, Homo sapiens; identical to SEQ ID NO: 2001

SEQ ID NO: 2003 - DNA, 313 bp, Homo sapiens
tttctttttttttttttttttttttttttttgagacagcgtctcactctgttgcccaggctggagtgcagtggtacaatcacacaactcactgcacctccacctcctgggctcaagcaatccccctgcctcagcctctggagcagctgggactataggcatgagccaccatgcccagttaatttttaaaaattattttttgtagagacggggtttcaccatgctgtccagcaggtctcgaactcccgggctcaagcaattctcccaccttggcctcccaaagtattgagatgacaggtgtgagccaccgcgcc

SEQ ID NO: 2004 - DNA, 313 bp, Homo sapiens; identical to SEQ ID NO: 2003

SEQ ID NO: 2005 - DNA, 1399 bp, Homo sapiens
ccttgagctagcatttcattatgaccgtgatttttccccgcatcactttccagccttgtggtccacaattccactgggccctaagtatgtactgaactttcctgcctccctcattttgctctgcttgtgcaattttttccaccctccatctctgtcaaacataagccttcctgacctctaagacctacctttgtcatgtgcctttaccctcaggcaaggggcaatctcttctattcctcttctaccttcctgtagcttctcccccagggtttatcacattctgccttgaatcctagggaacaacatgtgtagtggaatgaacacaggcctctgaatccaagatgtgagtttaaatcccagctttggaggtggttacttaagttctcagtgccttcattcttcttcctatataaagtagatattacaatatctaacttacagagtcattgggagctatacatgcagtgattgggtaaagcacctggcacatggcaagcaattagcaaatgctggttacttctacttctttctcttctcttttcccagtgtatcataagttccttgagagcaggcaccatgtctgatttacccttgtatttcccacagtacttcccgtagtgagttacccttagtaaatactcagtaagttgaattgaatttaaattacctgtaagtcttaaaatgtgggattaaattaagagtatgttgccctggaaatacccaaatgtctaccgatggatgaatggataaacaaaatgtgatatacacataatggaatattattcagccttaaaaaggaatgaaattctgacatgtgctacagtatgatgaacctggaagacattatatgtgaaataagccagacagaaaaggacaaatactctatgattccacttatatgaagtacctagagtagtgaaattcatagaaatagaaagtacaggttgacatcgcaaatctgaaatgggaaattctccaaaatctgaaactttttgaatgctgacatgatgctcaaagaaaatgctcgttggagcgtttcagattttggatttttggatttgggatgctcaactggcataatgtgaatattccaaattctgaaaaaatctgaagtctaaaacacttctggtctcaagaattttggataaaggatactcaatgtgcaacatgtagaatggtggttacaaggtggtaggagagaatggagagttactgtttaatggtacaatgttcccatttgggaagatgaaaagttttggaggtgtgtgatggttatggttgtgcaacaatgggaaggtacttaatactgcttaactgtgcacacttaaaaatggtaaaaatgataaattttgtgtatgtcttacaacaataaaagaagttttttttttcaaaaaggaaa

SEQ ID NO: 2006 - DNA, 1399 bp, Homo sapiens; identical to SEQ ID NO: 2005

SEQ ID NO: 2007 - DNA, 788 bp, Homo sapiens
ggaaacattgcttctgtaccagccaaccttctgctcctgaagaatatctctgctatgggcctgtactgtggtcaatacaaaaaatgaactttcccgtcttctccaagagcctatcttcagtgcttcggtactgccagcaagggcgcatccaaccatatgtcggaatggttttcaagctggatgaggtcaatgatgccttccttcatgtgatacaggggaaatccgtgggcaaggtgcttctcgctcttaaataaatcctcacctgagcagcaaagttaacatgtccagatcaaaactccacatctttccccaaaacctgatttcccttctgtgtttccaaaggtgttaccactttccttaccaatccaggtttaaaatcttggagtcacctttgattctgtttactaattgcccctaattaatatgattatatagtttattgtccaaacctttttgagagtaaaagggtgccattagtaattacatcaggaaaacatatcccaggcaaaccaggatatatggtcagcctactcgatgcattatgaaatgcagtgattgccaagttctgtcattcccacctctaagatatctcttacctccatatcctcttttccattctgactaattaagcctcaactgctgtcaccagtgaccttctaactgcttttcctacctttaaactaccctcaccccctccattcttgtgatgcattattgccatggtgatcttcccgaagcatagctctgactatggcccatctcagaaaacctacagtggctcaccgttg

SEQ ID NO: 2008 - DNA, 788 bp, Homo sapiens; identical to SEQ ID NO: 2007

SEQ ID NO: 2009 - DNA, 1344 bp, Homo sapiens
tgattgtaagtttcctgaggcctcctcagaagccaagcagatcttagcaccatgcttcctgtaagccctgcagaaccatgatccaactaagcctcttttctttataaattatccagtcccaggcatttatttatagtaatgcaagaacgaactaacacagcatggaaggctcttgatgatctagtgtattactttcttgtggctcctgtaataaattatcacaaacttagtggcttaaaacaatacaaatttatttattctcctgcagatcaggcatcagaagtccaaaatcagtcttctggggcaaaaatccaggtgtcaacagggctgtgatacttctgaagactgcagggagaatccgttttccagcttttttcatccaccagaggccacctgtattccctatcccacaaccctagccccttcctctatctttgaagtggactatttcatcccctgtttctatcatgacagtgccttctctcatattgaccctcttgccttataagattccttgtgattacactgggtccacctgcataatcaaggctaatctctccatctggagatcttaatataatcacatctacaaagtccctttggccattgaagtaacatatttatatgttttcattattaggatgtgggacactttgtcagggacagggatttttcagcctaccttttttcttcaccttttgccaccactctcagcctgtggtctcaattgccagcctttacacttgctacccccattgtctgggtagttcataccagtccctcaagactagcctcaggcattgcctcttctgggaatacatcctcttacaggccaggatatgactcatgggtgcattcctaatagcacttcacttatttctactgtcaccacactgatctgtaattacttgatttgtctgactcttctgggggcttgtaagcattctggcacagagaactatgacttactggggcttacatctcttgctaaacacagtacctaaaatttagtaggcattccctcataaacatgaatgaatgaatcaaagaatgaataaacatttaggaaatgatgttgtgttggtcaacttctttcctcatcactgttaaagataaaagaatgccaagccaggttgttcagacagaagcaagcaccacatccctgagagagcagcacatctgggcagccatgtgtgagaagtcggttgcattccccatacacagttgtctttgcagctgtactcttaaccactgtaaccacagaagtggggaaacaatagggtggggtgaagtgaaaagaaaattttccaaaacttcatttatctaataaatacagatatttaa

SEQ ID NO: 2010 - DNA, 1344 bp, Homo sapiens; identical to SEQ ID NO: 2009

SEQ ID NO: 2011 - DNA, 340 bp, Homo sapiens
agaaaaggaagagctattctgacagagaaagatggcacaaagaaccacttggtcttagtctcagactcacctttgacctggttgtggtgtcccctaagtgtgtacagcagtcacaaaagtccatctgaccctgccctagtctggctgtcatatgacctatcccccacccccactgcgagtatctttctaaagaggaaatctgatcaagctacctccctaactaaaatcccttagtggctttccagcatggcacgtgacatagcttggattcttgtccccatccaaatctcatgataaaatgtaatccccagtattggaggtggaccctggtgagagcacc

SEQ ID NO: 2012 - DNA, 340 bp, Homo sapiens; identical to SEQ ID NO: 2011

SEQ ID NO: 2013 - DNA, 2593 bp, Homo sapiens
tgggcacctgtaatcccagctagttgggaggctgaggcaggagaatgaatcgtttgaacccaggaggtggaggttgcagtgagctgagaccgcaccattgcactctagcctgggcaacaagagcaaaactccgtctcaaaataaatacatacatacatacatgcatacatacatacatacatacggggattaaaatagtctagtagtgacacctgaacagagagattgatccaagaaatgaaacagaaattccggaagttgacctgaatacacacacacacacacacacacacacacacacacacacgaaggcgtgaaagactccatgaccctcaaggtataagatgcattttttttttttttttgagacagggtctcactctgtcacccagactgggtgcagtggtgtactatcccagctcagctctaccctccatccccccaacctcccccaaccaccctgagctcaagcaattctcatgcctcaaccctcagcctcatgagtaactgggactacaggcgtgcaccaccatgcgcagctaattttttgtatttttagtagagatgggtctaaccatattgcccaggctggtctcgaactcctgagctcaagcgatcctcttgcttcagcctcccaaagtgctggcattacagctgtgagccaccgcacctggccgcattcttctaaatcacagtacatctggctcccagtgcccaggctctcagggcagaaggtccagtgtgatcactttgcatggcctctctcccctcctgagcttgtgccagggccccagggctgacctggagaaggaaaatggcagagggtgaagatggggtgtctggtttggggaccatcctggccccccttgtcactgttgacatctcttctgcacagtggcattgctgggaggtgcttactgtgcctattcaaggggctggcagccgcagcctcactgcagatcagggacttggcttcccagttgaccacaggtccaagaacctgcagggtccagcctcccccccatccccagtcttccccaccctggcccggccctccaggtgcagaaacatgcaggcccctctccaggactgtgggaggagcgtgtccctcagactggcctgtgtcctggctcctcttaccacctcttccacaggttgtcacctgcagctgccccaggataaaggcaaggccagagaggactcctgaactcctgtgtgcctggggtggcaggggcaaacatagccaactggtggcctgagcggggccatggtgaggacacccttggtggcttgtcccacatcaagctgggaggtgacactgaggatgcattagtctgcagcgtatgataaaaacggcatttcaggccaggcgcggtggctcatgcctgtcaccccagcaccttgggaggccaaggtgagcagatcatatgaggtcaggactttgagaccagcctggccaacatggtgaaaactcatctctactaaaaaaacaaaaattatgtgggttggtggtgtgcgcctgtaatcccagctacttgggaggctgaggcaggagaatcacttaaacctgggaggcagaggctgcaacgagccgaaattgcaccactgcactccaggctgactccgtctcaaaaaaaaaaaaaaaaaaaaaggcatttcagttcaaatagggaaaggatacatctttctttcttttctctttctttctttctttctttctttctttctctttctttctttctttctttctttctttctttttctttcctcccttccttccttcctttctctctctctctctttctctcgttctctctttctttttgagatggagtttcactctcgctgcccaggctggagtacaatggcgtgatctcggcttattattattctccatgttggtcaggctggtcttgaactcccaacctcaggtgatccgcctgcgttggcctcccaaagtgctggtgtgagccactgcacccggcttaggatgcatttttcaatattttagtgtttgaataacgggctaacttgagaaaaaaataatttgaatcacacatcacaccaaaaataaattctaggtggattttaacactttcaaaaattattattattattagtttagagacagggtctcactccgtcgctcaggctggagtggagtggtatgatcatggttcactgcaaccttaaactcctggcctcatatgatcctccagcctcagcctctcaaaggactggaactacaaacatgcaccaccacgcccagcctaggtgggtttttaaaatccattcaagggcgggtgcagtggctcacacctgtaatcccagcattttgggaagccaaggtgggaggatcacttgagcccaggagttcgagaccggcctgggcaacatagtgagactacatctctacaaaaaatttaaaaatgagccaggcatggtggtgcacacctgtagtctctgctattcaggaggctgaggcgggatcattgtttgagcccaggagacagattgcagtgagctatgatggcaccactgcatggcagcctgggtgacaaagggagattcagtctcaaaaaaaaaaaaaaaa

SEQ ID NO: 2014 - DNA, 149 bp, Homo sapiens
ggctgggtgcagtggctcacacctgtaatcccagcactttgggaggccgagacaggtggatcacctgaagtcaggagtttgagaccagcctggccaacatggtgaaaccctgtctctactaaaaatacaaaagttagccaggcgtggtg

SEQ ID NO: 2015 - DNA, 8996 bp, Homo sapiens
gacggggtttggccatgttggccaggctggtctcgaactgctgacctcaggtgatccgcctgcctcggcctcccaaagtgctgggattacaggcgtattccactgtgcccagcctgagtttctgtttagaaacaacagtctatgatagtataatcctctcttttttgtacacagagtaaagaggacaaataggtgaaagaataaatgaaaggctggaatcccacttcccccgctgtcccagggcattggatattgacggataggaggcagcaaaccactcacagagccaggaagaaatgaaggcgttggtattgccaggaggggaagccggctcggctgaaatacgctatgaccatagcaaggagatactgatggagagaaaggaacacagagagggagaggtcacatcttggaagaggaagattgtggagagggggaatgagggtctggggaggggctgcccatcagagaagggacctcagtgttggggtgactgtactcatttggaaattgcgggatggaggggtattcgaaggtcggatgcaaatccgagaagccagaggaagggttttgggtgatgctcccaggatggtgggctccgatgggatctttggagggggtgtgtctaggttggctggtgtcaggagggtcttttgtgtgccaggcagagaactgtcccgaagagctgagagtagaggggccaggagcttcagggctgcggccagactgtggcccagagctcagatcccaaaggacccataggagaggcaggggccactcattcactctgcaagagaccagcagaatcctgagggagatgctgacaaatcataaaaagaccaagaatagccgggagtggcggctcaagcctgtgatcccagtactttttgagaggtggagacaggaggatcatgtgagcccaacagttcgagaacaacctgggcaacatagtgagaccctgtttccacaaacatttcaaaaattagttgagcatggtggcatgtgcctagtcccagctcctcaggaggctgaggaaagaagattgcttgagcccaggaattagaggctgcaatgagctatgatcatgccactgcactccatcctggggagcagagctagattctgtctcacaaaaaaaaaatttgtgggtgccaagactcaagaccatgggagctggtcgggcacagtggctgacgtctataatctcagcactttgggaggccaaggtgggtggattgcctgaggtcaggtgttcaggaccaacctggccaacatggcaaaaccccgtttctactaaaaacacaaaaattagccaggcgtggtggttcatgtctgtaatcccagctgcttggaggctgaggcaggagaatcgcttgaacccaggaggcatcggctgcagtgagtgaagatcgagacactgccctccagcctgggcaacagagcaagactctgtctcacacacacaaaaaaaaaaaaaaaaaaaagactgtaggagcatctggtgggaggtggtggagggagaactgtgggtttggaagctgcgccctccccccagccatgcgttggaacaggaacagttacatggagaacaaccttaccttgtccgacaccctcagatctttgtcccaggccaggaatcttttaatgacaggatcctctgtgattagagagcagatgtcagtgtgagaagcaggacagggtttccgtgggagcagcagggcagcgaggagaagtgtgcctcccggggggaagtctcaggattgtggccgcgggtgaggtggatgggagaggggagaatgactttcactgggcaagggagagaggctcctgctctgagactcccctgagaagaggccgaaggaggccctgggtgtgagaatctacaggatgtagagctgggaatcagccaggaccccctccagcagacacggagggaccactgcagagtcataaaggaattcccatcatttcctcatgagacagtcacacatcagggtgtgaccatggccttggtatcccccactatggatggagacacttaggtttagaaaagtcagtaagagacattaagtttcagagggcacagctgaaaccactttctttgtttattgattttgtttttctttatttgatttttatttttatttatttattaatttattttgagacagagtcttgctctgtgggccaggctggaatgcagtggcctgatcttggctcactgcaacctctgcctcccgggtttaagcgattctcctgtctcagcctcccgagtagctgggattacatgcatgagctactgtgcccagccttggtttttcttttgagacagggttttgctctgtcacccaggctggagtgcagtggtgtagtcatagctcactgcagcctcaaagtcctgagttcaagcaatcctcttgcctcagcctcccaacgtgctgggatctcaggcgggagccactgcgcctggcccgaaaccaagctttcttatcccaagcgctgacctttatcaagttgacctaatcctttatcatctcctaagtgtccctcatgagtgatcacttcacattcctcccacatggagagctcacccactggggcctatttttcccattggaaaagtgtggttattggaagtttcctgtttttggaaagaacaggattggaggtgctctctggggtgtcctcctaccaagcagcctgttgaaggcctcgtggtgctcagggagcacgagcgacactcgccgtcgcttcagcttcatcttgaggccacacagcatctccgccacccagatctcctcaggctcaggggcgagcaccttccgtggctcctcctccgactcctcagatttgtcccaccactccatcttccttttccagcaaaaggacctatgcggggggctgggatctaccccaggggctgagtaaagaaaccaggccacggtgtaatgcttctgcagttgatcacactagagcccgacccaaaaccccaaaccactctccatcctccccagcctcgcagactgctggcttctccaagccatctttccttctgtctgtctcctctgctgagctccatgtgccgctccttctcctccccattctcccgtttctctgtcctcagaacacttcctcatatccttccctggtccctggctctctgagtccctttttttttttttttttttttgttgttgttgttgagaaacagtcttgctttgtggcctaggctggagtgtagtggtgcgatcttggctcactgcaacctctgcctcctgggttccagtgattctcctgcctaagcctcccaagtagctgggattacaggtgcccaccagaacgcccagctcatttttgtgcttctagaagagacagggtttcaccatgttggccaggctggtctccaactcctggcctcaagtgatctgcctgcctggcctcccaaagtgctgggattacaggtgtgagccactgaaccctgcctcagtacctccattcttcccacacaccctcctcacgtgctccttcctgacttctgggcccgcccttccttcttttttttttttttttgagacagcgtctcactctctcacccagaatggaatgcagtggcactatcttggctcaaaacaacctcttccacctgggttcaagcgattatcctgtctcagcctcccgagtagctgggataacaggcatgcctggctaatttttgtatcgttagtataaatgacgtttcgctatattggtctggttggtctcgaacaactgacctcaagtgatccacccatctcagcctcccaaagtaatgggattacaggcatgagctaccacacccggccttcgtttttcttttgacacagggttttgctctgtcacccaggctggagtgcagtggtgcagtcatagctcactgcagcctcaaagtcctgagttcaagcagtcctcttgcctcagcctcccaacgtgctaggatctcaggcgtgagccactgcacctagcccgaaaccaagctttctcatcccaagcgccaacctttatcaagtctagcctagtcctctattgtctcctaagtgtccctcatgagtgatcacttctgagtcctcctgcgtggagatctcacccactgggggcgtatctttcccattggaaaagtgtggttattggaagtttcctctttttagaaagaacaggattggaggtgctctctggggtgtcctcctaccaagctgactgttgaagtccttgtggtgctcaaggaggatgggtgacactcgctgttgcttcagcttcatcttgagcccacacagcgtctccactacccaggtctcctcaggctcaggggcgagctccttctccggctcctcctcagattcatctgaccactccctcttccttttccagccaagggacctacatggggggctgggatctaccccaggggctgagtaaagaaaccaggccactgtgtaatgcttctgcatctgatcaccttagaccccgacccaaaaccccaaaccactctccatcctccccagactcgcagactgctgacttctctaagccatctttctgattttctcctctgctcaaccccatgtgccgctccttcccctccccattcttctctctctctgtcctccgaacgctgcttcatgtccttccctggtccctggctctctgagtccctccttttttgttttgttttgttttgttttgacacagaatcttgctttgtcacccaggttggagtgtagtggtgcaatctcagctcactgcaacatccatctcctggattccatttattcttctgcctcagcctctcaggtggctgggattacaggtgcctgccataatgcccagctcaattttgtacttttagtagagacagggtttcaccatgttggccaggctggtctcaaactcctggcctcaagtgatccgcctgccttggcctcccaaagttctggggttacaggtgtgagccaccgcacccagcctgaatttctccattcttcccacacaccctcctcaggttctccttcctgaccgctgacccttcttttcttttcttttcttttttttttttttggagtgcagtagcgtgatctcagctcactgcaacctcttcctcccagtctcaagtgattctcctgtctcagcctcctgagtagctgggattacaggtgtgcaccactaccacttggctaatttttatacttttagtagagatggggtttcaccatattggccaggctggccttgaactcctgacctcagatgatccgcccgcctcggcctcccaaagtgctggggttacaggcgtgagccaccgcacccggcccccttccttcgtcttagtcaatcctatcccacctcttcttccaccagtcccctcacctgatggtcccaacacttcatcatccaccacctcctggagggggtaccccgaggtgctccgctggggactctgctcattctggcggtgcggttgacggctggtcgtgatctttcccgtaatctgtcccctcttacggaacctagtctccgttctgtccatggccttcttctggacactgctaggatccagaagagtatgttatcaattctcaagcctaggagaagtcaggagtggagaacagctctgagaagatactgttgtccaactgatctccaggcaccacggagtccggtccctccaatcaggaaggtcggaatctctgatgtcatcgttcatgccaacctggcaaccagtttgaaaaaaaaacacatgtaactgccaggctgatctcttgtcctggagatcctgggtgaatggtatctcctgccactgtcccaacctcagaccattgtccaaaagcatcttcagggactccacatccctctgttccctgtcccagcagaggctgtgtcctctccactcaaagcctgaagcatgttggggtctcttcgtctctgtacgtgcccatttcagagtccagtctggtgggagagggaacagagtgggaaagaaaactagggtaagcagaaacgatgaaaccttataagagtgagattatcatgtacaagagtgagattatcatgtacaagagtgagattatcatgtacaagagatcccaggaatactgacttgatgaaaaagtcacatcagagcactcagtttggcagagcttttctgctgaatgtttactcacattcactgtccaagattctgtactgggggtacatacgtcctctgccctaaggcaattttgagtccaagagacattttgaggcctaaaaatcataggaaactgcccctgagctcacacatatttccaatggagctcacacatatttccaatggtgtccccaatttcagggaatccatggattacctaagccagcccctccagttcggctaagaaactctagtctatatatcaagttttgtatcatatgtattgctctgaactcagaaatttcccttccatttatggattctatgaataaaatatcacatgtacaaaaagactaagtcgaaaaatttcagctgtgcacagtggctcatgcttgtaatcccagcactttgggtggccaagggaggaagattgcctgaggccagcagttcaagaccagtataggcaacatagcaagagcccatctctaaaaaaacaaaaccaaaccaaattagccaggtgtggtggctggcacctgtgttccaactacttgggagactcatgtgacaggaagatcacttgagcccaggagttagaagctgcagtgagccatgatcttgccactgcactccagtctgggcaacacagcaagatactgtgtcaaaaaatttttttttgataaaaaataaaagagttacatgacattcagagaccatccaaaaaacctgcgggttcccggctgggctcagtggctcatgcctgtaatcccagcactttgggaggccaaagtgggtggatcacttgaggtcaggagtttgagaccagcctggacaacatggtgaaaccccatctctactaaaaatacaaaaaattagccaggcatggtggtggatacctgtaatcgcagctactcaggagagggcgctggagaatcacttgaactcatggtgcgcaggttgcagggagccaagatcgcaccattgtgctccagcctgggcaacaagagcaaaactccatctcaaaaaaaataaagaacctgcgagtgagttcccacacgttttcctgatgggctgctgctttcctaggagtctctcgctcatagaaaaggcacaaactgaaagaggaagcagatcccattgctgtggaagtcccattgttaggaagctctgcttttctggagttcaaattcgcattcatgacgctttaaaccgtcagagctgggtgggtcctcctacaacaaaatcgtttgctctctctctcctagttaacaggctttcaaatattagaagatcaatgttctgaccccattaaaatttctcttttgtggaatgaaaagctctgatttaacccatcttcaagcctggtttgatggaggaataggggctgagtcacctgcatttcccctccctgcacaaagtcctgggcccagatctggggtctgtctctgctgagggtggggtgaaccaggaagcacctccctctacatctccttgatgaatgggtataatggttgccatggaactggggcttgtttgatgacctggggctgggtgggcctctgagagcctttatagctgattgccttttgggagagggcaggtgggagccccaccctgtcttatgagtcaccccaaaggtgcatgggcaggcaggtgctggggaatcggctactccccagagcttggcgtggccatccctgtggcccctctgggagtctggagcccattccctcacactggtactctctgcagctggggacatctgcactaggaagacaggacacggcatggaagctggcctctgcccagaagccatgacattctggtcaccagcctgatgctataaaacgagtgtcacggccgggcatggtggctcacacctgtaatcccagcactttaggaggccaaggcgggtggatcatgaggtctggagttcgagaccagcctggccaacatggcgaaatcccgtctctactaaaaataagaacattagccaggtgtggtggcacatacctgtagtcccagctcctctggaggctgaggcaggagaatcacttaaacccaggaggcggagattgcagtgagccgagaccacggcattggactccaggctgggcaacagagcacgactccgtctcaaaaacaaaaaaaaacgagtgtcacctggggctacttggccagacacagagagcaaggagacatccctattatctgtcaaaaataattgttggggctgagcacagtggctcatgcctgtaatctcagcactttgggaggtcggagcaggaggacttgaggcctagagtttgagaccagcctgggcaacatagcgagcaccccatctccagaaaaaatttaaaaattggctgggcgcagtggctcatgcctgtaatcccagcactttgggaggccgagggggatgggtcatttgaggtcaggagtttgagaccagcctggccaacatggtgaaaccccatctctactaaaaatacaaaaattagccgggcatggtggtgggcacctgtaatcctagctacttgggaggctgaggcaggagaatcgcttgaacccaggaggcggaggttgtagtgagctaggatcatgccattgtactccagcctggacagcaaagctagactccatctcaaaaaaaaaaaaaagtaaaaaatttaaaaattagatgggcatggtgacatgtgcctgtaatccaggtactaaggaagctgaggtaggaggatgacttgagtctaggagttcgaggctgcagtgagctctgatcgcaccactgcactccagcctgagtgacacagcaagaccctgcttcaaaaaaaaaaaaaaa

SEQ ID NO: 2016 - DNA, 2959 bp, Homo sapiens
gaggaagagaaggtcactaccatcatggagatggcttccaagatgaaagacacaggtagactccaagcccctgaagagcaggaaaatactggaggttgaacaccccctactaccccacaaaaggtcaggttgggttctgaccacctcaggtgctgccacctagaggagaaggcaagctaaagaagaaatgttaatgggctggtacttgttagcaaggctagcttaaaggcttcctggcctgatatgtatgggtaccattaataagtgtttattatgtgccaggcactgttatgaatgctttatatacattatctcactgaatcccacagaacagctttatgaggatgatcctattgttggtcctcttttacaaatggggaaactgagtttttgggggtttaaaaacctaaccaagttattaggaagtcatgaagctgggactggaacccgggtttgtctgactctagagcccacgatcttaatgctacctcccactgccatgagtctgggccctagacattgcctgcaccctccacagccaagtgatccttctctctctcctcccaaagggttcatcgtgtttgctgtgcttctgctggtgtcatgcctcatcctcatctttgtcattgccccacgttacgggcaaaggaatatcctcatctacatcatcatctgctctgtgatcggggccttctctgtggctgctgtcaaggggctgggcatcaccatcaagaacttcttccaggggctgccagttgtccggcacccgctcccctacatcctgtccctcatcctggcactgtccctcagcactcaggtcaacttcctcaacagagcactggacattttcaacacttccctggtgttccccatctactacgtgttcttcaccacggtggtcgttacctcgtccatcatcctcttcaaggagtggtacagcatgtctgctgtggacattgcaagcacccctctcgggctagtcaccatcatcttggcgtgttcatgctgcatgggttcaaagacctggacatcagctgcgccagcttgccccacatgcacaaaaacccacccccttctcccgccccggaacccactgttattagactggaagacaagaacgtccttgtggacaatatagaacttgccagcacctcatcaccagaagagaaacccaaagtatttataatccattcctgaagcttggaatatgtgagtgagaggatgagtccgatggtacagcctgccctcccaatttcaaaaccacctggttattttccagtgcaactgttaccaatgggctctcttttcttgagaagttcatttatacctcatcactgtttccaggagaaaaatctttacccaaatagcaatggtggcagaacttcctggaaacagattcagtgaccaaatacccaagtttacatcagtgcctgcaggttccctggaccttccttctcattcattctttcggtgccatctctatgccgttgggaagaagatggagtctgacccactgaatgtagcacagtccaaggacttctctaagatattggtcattggaagttccttcacaccaattctcctcctgagacggaatctccgttgttgttgttgttgttgttttctagcccaaggatgacatagagctggctcccagaggcccacagagcaattggccatgcctccctatccagagctgacagggacacaaccagtgtaaaatatcctgttgcctttgtcacttcctctttggaggcagaagcaagacctcagctgaccttcttactgtgaaagccacttgatgtctcagggaaaaatttcaaccagctcattccccgagcactccagcctggcagtcagcacctcggcatccacccagtccatcccaccatcaccccttccccctctacttacatcctaaggagtcggtcactgagacataaaggcagtaatcgcagaactggaaacaaaacaataatagagccacagccaaactctggtggccaaacccagtgttgcattttgtcttactctgaaagaagaacagcaaattcactgcttcaaagtggcctggctgccaagctagaatttggcagaacgcactttactattcctcaaggagtcaaccaacctatgatctggggaggtgggaagaggatgaggagcaaagttgggatttggcagaaggcagtcccaggctctctggatactaggggctaacttttgtgttgactctggtgctcatctgggaacttaggagaaacgagctcaggggtaatttctgggttgcagccttaaaggcttggacagctgtgaatctcaatggccaactggaggtgcagacttggcatggggtgcattctagctgttgaccagattgctaccgagtcccctcctccactgatgagctgcccacactgggaagcagcatgccctgactgttccaacaccacctgctatggggagtacctttggtcccctcacatttggccagaggcatacaaaaaaccagagcagctggagagggagataattactattccttcccttcctatctcctttctagccacaagagtgtgggggttggagaagaaccattagaaagggaaattagtgggctggtgtatctggaaagagggaagacttgatcctcagccccgaggttggtgcagggcctcccctgtgtgactctacctgcactctgtgtttatatcctgtgccctaagtgggccaagcccaggtaaattcctgctggccttggaactccaaggtttggctgaccagcagactggctccctgactcttcagcctcaaatccccagtttttgatgaatgtggatttctgtctgtaattaaaagcaatgcaacaagttggctcttgagaatggcagtaaactgagggccctaagagtgtggtctgcagggtcaagaataaagattacagattatatttacttga

SEQ ID NO: 2017 - DNA, 2406 bp, Homo sapiens
gtaaaagtggaggatatgagtcttgtggggacacagagttgaggcatgagctattagtcagagccgtaaggctgcctgcaggagaagaactttggatggagttttgaaggaagtgaggaaaagatctgaattaacgtattaacacataaagcttgtcatctgaacaggactataagcatctcgagggtaagaacgtgccttttctttcttacacattcccagaagacccacattcctcattgggctctctgtaacagtatttactaagcacttgaataactggacatgggcaccatgttgctaagttgattaaaggttggtcttccactctgccactggccacagcacaaagtgaaaacagatgtcacaagcaccttgtagatctgtcccttttttcttctgatgttcaccctccttttgagctctttctttctccaacattgcttacaaaataatctttatgcatctgagagggagcaaatattcagtaactttctgcagctgtcctcactaaagaggagaatctgttgaatgccactggaaatgtaaggatctcttgtgacagtaacatctcaaggggaaactagtggttaaattgttaattctttgagtctgaaacttttttcatttgcagtgcagataagtgcctgatcttgcagtatcacgtttctgacttctttgttctggcttcattttttttttcccaaaatgccattttcatttgttcttagagttcagaacatgtcaaagagcttctttaagcagtaggtggttttacagagcccacagagaaggaaaactaaatatcatcccggatgcagtccactacgatcgtggaggagtcagattactctccgggctttgctgtgtctgcttgtgaaacaggaaagggagaactgaggcaatgagtcacctcacttgggcccaaagcaccacctacgttgaatatggagaaaatgtgaagcaagagtttctttttatacataatcaccatttgtacataatcaccattttctccatggttcttatccaattcagtgcatcttaaaggatggtttgtggaatcatgacatagcagaaaaatccaggtactatcagtcttgcctgtttctacctaactctttcatttaaactctcactagaatctataggaactgttagcatcaattttaataagttgtcaactaagtgattagtggtatttattggttatttttgacaaaataatggaatcatcaaattttgaagttgagaagtaaagtaaaaatttgtgccaaaccccaaatgtagacaaggtcatattataaacattaatgctgtcccaaactgccaatgcattgcgtagaactgaggttagcaggttaccattgatttcctctacttatgctttaagaggttggcattggtaagccgctacactttcttggtcaatgaggcagaaacccctttgcaaaactctcaactgatgaaaagattagctagaatgactctaggaactgttttctaaggatctgactcattgattcctttttttggtagggttctctgggccaagttagttcgagtatttatcatttaaattaggaaattaccatcaccatcatcatgtacattcataaatcaaagcaagattagagaaggaatatggtggatcacagagcaactcagaaagacgacagcaacaactaggaaatgaaacaccatggttgtatttcaggaaccctacccagcagataggaattaccatagctcctaaaattccatctgggtggttgatggagcctcaattaatctgacaccatagcccatgctcccctcttgctacctgctgaagttagcagggaaaagtcaaagagggtgctgtcagtggggtcaattcttagggatcatagtgaaccaccctccattgcactgactctttcccacaaaatgggctagagatagcagctctccttatgtatttaagaaagaatggtcaaaaaatacaattcacattttattctggtatataccattttgacagtgtttcacaatgtaggtaatatgaatgggagtatttaaacacaatcctgtttaatattcttagccagtacttattaaatgcctaccaagcctggcattgttctagagacctcaaaatacacctttaaaaacatattttattgacagttgtataaatgaagaaaacaagtctcagaaaattaaagtgacttgcacagatacacaagctagaaagtaataaaactgaattttgaacccaggtttgtcagactctaaagtccatgattttctgctccatgtggccaacccagttagaaaggttataaaaaatcttaacagtttttcagcccttctcacacttagctttaggattaaaagtattggtcatgatttgcaaaaaaaaaa

SEQ ID NO: 2018 - DNA, 718 bp, Homo sapiens
cctctatattagagagaagatttacaaacgttggggaaaaaatggaaattgagactgactcctaaggaaacatctgttcactcactcagcaaacatttagcccactctgctaatgctaggcactgtgctagatatttggagagacactggagaaaacttaaggtccctagtcttgtggctcttacattctagagagggattataaatgacggcgtagttattaaaaaaatacagatgatgatttcaagccttataagagcaaagaagaaaagtgaaccaagttaatgtaatggagagtattggagtaggcgaggctgctttagatcagagagtctgggtggacttgatggaggaggtcatggatagccttgcagctggtagacctgtgggcaacattaacagcagataggacaagagggttaggggctaactgagcattcacctttgtcttctttttcccctcggttatgagtgtgacaaggcggaacatccaagggatatgttgcaggtgtcttaagagtcaggtaaaaggcaagatgattcattatatctgttctttttgtgatacccatgtaactacctataagcttcaaagtgaaataaacattacctcttgtaccttagcccgcttctcattcttcattacaaatttaagaaggcagttattaatgtgaatagtcattcttcttttcagcagtgccaactttaaaaaaaaaaa

SEQ ID NO: 2019 - DNA, 351 bp, Homo sapiens
gtaaaaaacaatatgtgaagcctttattccaactaggtaaaataaggaaggctttacaaaggagatgaatgacacttcagctgagccctaaagaatgaataggattctaatagaacagctgggggcaggcgtggtggctcacacctgtaatcccagcactttgggaggccgaggcaggcagatcaccttaggtcaggagttcgagaccagcctggccaccatgcaaaagcccgtctctactaaaaatacaaaaattagccaggcgtggtggcacatgcctgtaatcccagctacttggaggctgaggcaggagaatcacttgaacccacgaggttgaggtttcagtgagcc

SEQ ID NO: 2020 - DNA, 1365 bp, Homo sapiens
cagcatcagcagtgtgatggtacaccaagaaggggctgttgatataaatttttttaaaatattggtatagttaaatacttatattttaaaatattggtgtgttttttggtgctataaattactaacttgtgtgttcctaaaatcaagttgaaactaggataattgtctagttcttgctttgataagaacgcagtagttctgatgcttgtgtccatgtgtatgggtctgttattcttgcaagtgggtaagcaatgcatagctttttttatactgagagcactagaaggccaaagcatctcaaaaccatgggttctgggtatgcataatttttggaaaggcacgataagcaaatctcacagtctggctggtcagcagctgcagggataaggagactaattgccaaggccatgcaaatgcaaagaggaaggtgaggaggattcccagatgtgatcatagcttgcaaagatggtcatctcatggggccagaattcgtgcatgcccacacctacaaagctgagaactggtagtggtcatgtgtccgcttcaagcaatgcatgtattcacagccgccagcatcaagaggggccatcttttgataggatgacacatgcatgttcaaacatattttaaaagattagggagaaaagaatactgtgaacaaatagaaaccaattatgagcaaattcacgaattcggttatgtactattgtggctggcaaaagccacttaaactaggctctctagcctgattttcagccatcattacccctcactaagaatccttgtaaaatttcttccgtaaaagttaattacactcatcaccactgtttgctaatgggagcaaacccctagccaatattttttagaataatatggttgggataactttttttttttttttttgctaaatgaatgcatgattatcttatacaataaaagtataacacaaaatactgttttaagatagtcgctgggactctccttacccttgaagtgtccccctttccctcctccacatccagtcaaccgcaggttcctcccaggtttactatctgacatgttttagctctcttccttcttttccattcctctacaacttctctagttctggctttcattgtttctcaaccaaaacagtctccccttctctctcctccattcttgcgtccttccaaaacatcctctccaccctgccagagcagctcaccttagtcacagtctgactgcaactgcatgtgcttatcaatcctctcatttctcctcatcacctataacagtgcttttgacgctgcaacttgtgagccatttcgcgggttagaaaataagtttcatgggttgtaaccagtagtttaaaaaaaaaaaaaa

SEQ ID NO: 2021 - DNA, 13712 bp, Homo sapiens
  misc_feature (28)..(28): n equals a,t,g, or c
aaaggtcagcaactgtaatctgtatcgncttggaaaaaagaagggactacccagccgcatggtggtgtcaatatttgatccccctgtgaattggcttcctcctggttatgtagtaaatcaagacaaaagcaacacagataaatgggaaaaagatgaaatggtaagtttgtgtgtgtgtgtgtgtgtgtgtgtgtgtgtgtgtgtgtgtaactggagggatttacttttcggtgagccaaataatttgttttattaattttttgtttcattttcttggtatgtttataatagagtagatatttgatatatttaattaattcctttaattacactgtcttttcactgaattcagaaatagtattataattttgatggaggcaaatttctatttttattatttcttttccaaaggcataagagtatgtgatgttttgactttgagttttgctcttctttaaaaaaatttcactttgctgttattacaatttatcctagatccttagctctgttcagtgaaatgacttttcagtgacctgtgatctccagtctgtctgtgaaataattaatttcagtaaaatcttgcttttgtagctcagggttttcccagtcaggactcctgtgaacttaaaaaaaaaaaatcatccataaagattgttattttctggaaataatttaaatcttgccagtgacttaagaagactccaaatatcagcaacagccacttcattttgtcttgtcttgaaggccaccagagggcacttgggagggcctccaaactgcaggaaccagcgcagtggtggttgactgggagagttctagtgcctcttccgaagttaaaggcaatgcttcagacagtttcatttcttggagatttattttgcattaaaaataaattggctcattgttacttcatttttacctcaggccaacaatgataataccgtttttttctttcaaaggttatatttttaaatatccattttctccatgtcttctttgtgatgcatgtatcctatatatctgcctttaagtatttccaggtagcatgttcagtgacactatttggatttttacctatttattgaggatgtttttaactcatgtagtatttgtcttattacagaattagaacttatttggaaaagcattaagggaatattttaatgcaagttaggtccgaacaattatttgttattaatttagaaatatgtagaaccttagaggaaaatgtatagattttcaactttagaaatggtatggtatttctatgaataacattccagtaacagtcatcctcctttgttaataccgtttcataatgtttttggctctttttaaaaacttgtagcatgaaggtgacattggcatgtcattgattttttttttaagatacaacacaaagttcaatttatttttcttaatgtttctgatggcactttggttattggaattcattagaaatactgttcagatttttatttagtaagttacttttattgaaatataggcccttgcattatattgaaaagatacactgtggttttggctggttgcattgccattctccctaccttgctctggcccttcagcaaatgggcttaagtggaaacctttgcatgctaaaacgcctcttaatagacgagagtatcaaagttgacttgaatgatatagaaaaggatttcatgtggctgttttttcttaaaaggcttgaagtgctcttgaaaaacattttatgagacagaaccccactcttttgtagatgaagcatctgaaacccagaggcactaaaaggctttgcccaggatcacacagtttgtgataaaagtcagccctttgtgatttttgtgctctgccacttttggcttatggtggcacctttctaaagatacagaaggtttttttcaataaaaaaaaaatattgtctgattttttaaaaatcgcagtttggccctctttttcttaaggaccaatcaaaaacatcttcatgttgccttggaaagtctaagattgttagcaggaaatgttccttgaggtctgccgctacagttgcttttggtgttccttattcttgaaaaggtgtttctttcttaattaaaaaaatgaaaagataaatagttagagatatggcttggcttactgctatttcttttcagacaaatgtagtgtttatatcttgagtctagtttaaaatatttgtagtatttaaaaaatgcttgaaggttgcaacttttttttgtcagaacactggaaagttgttacaatcaacattgatgcacacccttcgtcttcccccttcacaagttttttggttttttaaaaacttgcataacagaaatttggcatctttctaggattgcaaagaagttacatcattactgaaatctagcccattattaaggttgtcactcacaaataagcttttgccaaagaaattggaattagcaaagatcttttgacagaaattggattgttgtgtttcatgttagtctaaattttcttccatttttgtcagttatgctataatctgttcccctgattaccgtagttcagagtggagggaaaaaacgtaacttctcaaattcatagcttagtgcagtgatcacttttattttttaaggaaagcagtgtagtttttttgtggcaagtatactttgaagtggaaatagggacaaaaagctttattataaaatcctattgtacattttaaaaaatgattttatctgtttttatattatattcttaattgcaaaggtaatgcttttctacatctggaatttcgttttattagtttgaaaatctttttgaaaatcaaattaccacattttcaaattttgtcagcaaaattgaagatctgtgtgatcagcatatgagtgctttcattgtgtgtcctaccagagttagacgacttagttgaagttttgcattgtggacattaattttaactttatatccatgttcaaagtccttaacttaaagcttcatactggataaaggtcattttataacttagaaaacgaacattcaaagaacatgttttactttgtttatatgattaaataacttattttatgttaattgaaaacaaatggccatgattttaaagttgccttttagtatttgtggttgtcatttgaaattatccataacccttgcttttattgagtttcaaacccttttaaaaacagcagctatgtttcccctccttccccattccccctcgtttcagacaaaagactgcatgctggcgaatggcaaactggatgaggattacgaggaggaggatgaggaggaggagagcctgatgtggagggctccgaaggaagaggctgactatgaagatgatttcctggagtatgatcaggaacatatcagatttatagataatatgttaatggggtcaggagcttttgtaaagaaaatctctctttctcctttttcaaccactgattctgcatatgaatggaaaatgcccaaaaaatcctccttaggtagtatgccattttcatcagattttgaggattttgactacagctcttgggatgcaatgtgctatctggatcctagcaaagctgttgaagaagatgactttgtggtggggttctggaatccatcagaagaaaactgtggtgttgacacgggaaagcagtccatttcttacgacttgcacactgagcagtgtattgctgacaaaagcatagcggactgtgtggaagccctgctgggctgctatttaaccagctgtggggagagggctgctcagcttttcctctgttcactggggctgaaggtgctcccggtaattaaaaggactgatcgggaaaaggccctgtgccctactcgggagaatttcaacagccaacaaaagaacctttcagtgagctgtgctgctgcttctgtggccagttcacgctcttctgtattgaaagactcggaatatggttgtttgaagattccaccaagatgtatgtttgatcatccagatgcagataaaacactgaatcaccttatatcggggtttgaaaattttgaaaagaaaatcaactacagattcaagaataaggcttaccttctccaggcttttacacatgcctcctaccactacaatactatcactggtaaggagcccacgaccagacttcatttctgggaaaatgagactttgtgttgatctcatcgtgttggccttgtaaaagtgatctatgcatgtacagtgttcatgcttaatattcaagggatggggcggggaacaaaaggaatagaaagaattcttttccttgttatttggggagcacgtattgctttataactttggttgttgggagtatggctatcatataccctcatcagtgtcattttatatctgcctaattagagaaattttaaccttagtattttgatgtgttttccccattttatcctccgcaaatatctttctcttgcccattcagtgctgcttttggtttttgatttagttgtatattctggatgtatttccacagccttttattgttcttcctggacaaaaagacccctcctttagggtctttttaaagatggatagattaaaagattaaaagcaatgatttcacaagaaggttgcgtggcccttgctgtgactctgctgtcatcttctacttctcactgtgctctgtatttgcccctcttttaatagactgtcaacccattagattagaagggagaacaagcccctcacacccaaatcagcttcaggctgtgaaacacagctgaagtttacatttcaatttctgtatcagaaaaataagtgcctgaattcagaacaccaaagcaaagtataaagtttgtagtttatataataaaagcagcgtaggttaaggtgatcagcaaaatgtaaaaaccaaaaagtgaaaaactatctgactctggactggaaagactgatgaaactaaagcctaattttcgttatggaggaaaaatgatacgtggctttcgactacattctgctggaagttccgagacctgggttctcgcctagcagtccctgcttcttaattccttgcttattctgggacaagtcaccatcggtccctgcctcagtttcctcagctggatatattattttaatcactgtgagaaaatagaggtgttgatttaacattgatcattttcacattttgacaaccagtttacctgcctttgctccctttcacaactcttctttctcaatctcttggtttgtggtaaattcatttctataatagctcaagttaagaagagggtcttcttttcctgtcatcctgtgtaacaaaaatagcccaggaatagtgaggaatggtatcacttatgcacagattccagagtgtgaatgagactttagcgatggcagcacagtgtagccacatggagaggtgtgtgcggccctggtttcacttaagtgatgatgtgtgagggagactcgagaggaaggccccagcacctgcccagacagcacagtgccagagaaaagcattcagtgatcatgatagcacctgtgaggttttgtttttccttcttaacaagcgttagtcttttgaccacttgaagattttatgaccccagtttatataagaaatgtacttaatttgtcattaaaatttagtttccagaggctttttagtatgatatgtcagatatcctttttgaagaatatatgtatgaaaatgattgtaaatacaaatcttcttcggatttggggatcagttgctatgtggggatagtgtaaatgcttctgcacaagcttacggttccacttcggatcccctcagattgttaccagcgcttagaattcctgggagatgcgattttggactacctcataaccaagcacctttatgaagacccgcggcagcactccccgggggtcctgacagacctgcggtctgccctggtcaacaacaccatctttgcatcgctggctgtaaagtacgactaccacaagtacttcaaagctgtctctcctgagctcttccatgtcattgatgactttgtgcagtttcagcttgagaagaatgaaatgcaaggaatggattctgaggttagtgctgttcaaaacgatgttgaaaaaagtggtctaactaggagtctctgtagtttcagagttctgacggcatagtggtctaaagggacagcaggaggtcaggggtgtgggacccagtgtgctgtgttctgtgggagcacgagtgaactgcagtttgcaggtaggcctcttgaacttgtctgcccccactgtgggctgtgtggtcattcaggtgaagagaaggaaccaggcctttcagttaggtacccttcccacgccttcatgagggcttccagcattgaggcatgccaaagaagtggcctccactgccggaccccaaggcaggtttagctttagtaaaagcccagtgtagcttatccttccttttttaaatggatcagaaatatttgctaatatctcagggaagcatcataaatatacattctgcttctacttgaagtgggaaaatctaatttaaaaaacaaacttctaaatttttgaccattggaatttgggaggcttctattgtaagttcagccaaaggctgtctggtgacagagctaattctaatgtgtttgtgagctatttcgaatttttgtaggaaaggatattgcttagatctttccagtctcttaacattcatctgcatacctgtgtcccccagagagactctcatttcctcctcttcccatttcatttcctttgattttcttatttttgtagattttcttataaggagtcaggaaatacaaccttaatactagtagctgttttagttgtcattgctttaatttgtaccttcccctttttaattgcaccaaacctttgttggggagtagtgactttctatgacaaaaattaagagtaggtttgaagtctagccgcagagccgagttcacgccctgccagctgcccagatgtgcactggaggagtcagtaggccctgctcttactttaacgcgcctctgtgctcttgtccaagatgaacagcctgagctggagcgtggcaggctgtgaggcgagaaggcgggaccagctcgtagacttccaagtgttacctagtctcattctttagaaatagctaagcttgaaatttgaggaattagttaaaattagatttaagctctctttggatgccagtggggcatattggttttgttagtttttgttcattcttttccttccctttgtttatataaacatatgtatagaagttacaagaactgattggaaatgtcatggtctggcatttctaacttactatttgatcttaagaaagtctctttacctctctgggcctccgtttcctcagctgtaaaaagagagaattaaacttggtaagttttaaaattcctttctatctcaaaaccataaatatgaacaataagtctgtttttttaagtaatcagcagtataaatgtattatatgtaactttgtatggctaaacaacctattagaaattagtattttcccactttctctttatttttttcacaaatgatttgtgttgattttagaaaagttagtacaagtaaataagaagaaaattagttaaatttgcctgattatgctacctcggaaataaccaatattaacattttgggaggaattgtggatgtgtatagatataaacatatctaaaatgtaaaatggaattctgttatgtataggatactgtcacctgttcttttcacgtataatatattgtggctgactttccgtgtattgatgggtatcgtgatgctcaggggccacacgctagtcaacacgtggctgattgatttaaacgcttctttatggccgagtaattaagtagtttttggttaggatgtttaataaccatggaggtgataaatacgcttatgtatctagttacctccttaaaataagttcttagagatgcaattgctgcatcaaagaattgtgaacttttcaaaggcttttgatgcatgattttcttttattaatttgcatacatgctatgtcagatactcggttatagtgaacacatatctagtggcttaatgaagagggaacttggaggaaaaaatctttcaaatataatttccctatttccctacaacagcgatttctgctccccaaagcagcatacacccgtgccagcaccagaccaattagtactattgaatgcttgccaagcagctagggagtagaactgttttaaagtatagttctttgattacgagtgaatttgaatttttttcatacttttattgactatttctaattctttgttaaggttgtttaaagttagaagtaatcttttttctttgctgggtatatagaataataaatggggtggggatattttttctttttttcttgagaagtttgaaaaacttttttaaaaatataacatttgttttactattacaatatagtaggcataccataaatggtatttccccccttactaaagaagtaacaaaagtcatatatccaagaaaagaaactacatctgtggactgcctgtaaaagtggcctttttgcttacaagtcacttttccctctgtaatagcttaggagatctgaggaggatgaagagaaagaagaggatattgaagttccaaaggccatgggggatatttttgagtcgcttgctggtgccatttacatggatagtgggatgtcactggagacagtctggcaggtgtactatcccatgatgcggccactaataggtattgttggctccctttagaaagaaaaaaacccacaaaattaaaaacaacttcagagatattattcatattattctttcattttgattgcagaaaagttttctgcaaatgtaccccgttcccctgtgcgagaattgcttgaaatggaaccagaaactgccaaatttaggtaagcaaaaaatgtacatggaaaaaacattaacttaaaaacatcaaaggggaaaagttcacaaagatattgtaaactaatgattctgaaaaatatttacactgtggtgtgctgttgtcagatttctgtttgtaatctgattgacttctcttttttccttctgtttttatgaaataatgctgtaataaagactagacggcagccctgtctgtcgggggtatgcaatggcagtaagtcgtaacgcgtgtttcctttgtgtggtgtcagcttatacatgggactcctggcctgagagtgcacactaaatgctgattgacaatgataataaatacttctgacttctaattcaagctgtttggattttttacagcccggctgagagaacttacgacgggaaggtcagagtcactgtggaagtagtaggaaaggggaaatttaaaggtgttggtcgaagttacaggattgccaaatctgcagcagcaagaagagccctccgaagcctcaaagctaatcaacctcaggttcccaatagctgaaaccgctttttaaaattcaaaacaagaaacaaaacaaaaaaaattaaggggaaaattatttaaatcggaaaggaagacttaaagttgttagtgagtggaatgaattgaaggcagaatttaaagtttggttgataacaggatagataacagaataaaacatttaacatatgtataaaattttggaactaattgtagttttagttttttgcgcaaacacaatcttatcttctttcctcacttctgctttgtttaaatcacaagagtgctttaatgatgacatttagcaagtgctcaaaataattgacaggttttgtttttttttttttgagtttatgtcagctttgcttagtgttagaaggccatggagcttaaacctccagcagtccctaggatgatgtagattcttctccatctctccgtgtgtgcagtagtgccagtcctgcagtagttgataagctgaatagaaagataaggttttcgagaggagaagtgcgccaatgttgtcttttctttccacgttatactgtgtaaggtgatgttcccggtcgctgttgcacctgatagtaagggacagatttttaatgaacattggctggcatgttggtgaatcacattttagttttctgatgccacatagtcttgcataaaaaagggttcttgccttaaaagtgaaaccttcatggatagtctttaatctctgatctttttggaacaaactgttttacattcctttcattttattatgcattagacgttgagacagcgtgatacttacaactcactagtatagttgtaacttattacaggatcatactaaaatttctgtcatatgtatactgaagacattttaaaaaccagaatatgtagtctacggatattttttatcataaaaatgatctttggctaaacaccccattttactaaagtcctcctgccaggtagttcccactgatggaaatgtttatggcaaataattttgccttctaggctgttgctctaacaaaataaaccttagacatatcacacctaaaatatgctgcagattttataattgattggttacttatttaagaagcaaaacacagcacctttacccttagtctcctcacataaatttcttactatacttttcataatgttgcatgcatatttcacctaccaaagctgtgctgttaatgccgtgaaagtttaacgtttgcgataaactgccgtaattttgatacatctgtgatttaggtcattaatttagataaactagctcattatttccatctttggaaaaggccccaaaaaaaaacttctttaggcatatgcctaagtttctttaattagacttgtaggcactcttcacttaaatacctcagttcttcttttcttttgcatgcatttttcccctgtttggtgctatgtttatgtattatgcttgaaattttaatttttttttttttgcactgtaactataatacctcttaatttacctttttaaaagctgtgggtcagtcttgcactcccatcaacataccagtagaggtttgctgcaatttgccccgttaattatgcttgaagtttaagaaagctgagcagaggtgtctcatatttcccagcacatgattctgaacttgatgcttcgtggaatgctgcatttatatgtaagtgacatttgaatactgtccttcctgctttatctgcatcatccacccacagagaaatgcctctgtgcgagtgcaccgacagaaaactgtcagctctgctttctaaggaaccctgagtgaggggggtattaagcttctccagtgttttttgttgtctccaatcttaaacttaaattgagatctaaattattaaacgagtttttgagcaaattaggtgacttgttttaaaaatatttaattccgatttggaaccttagatgtctatttgattttttaaaaaaccttaatgtaagatatgaccagttaaaacaaagcaattcttgaattatataactgtaaaagtgtgcagttaacaaggctggatgtgaattttattctgagggtgatttgtgatcaagtttaatcacaaatctcttaatatttataaactacctgatgccaggagcttagggctttgcattgtgtctaatacattgatcccagtgttacgggattctcttgattcctggcaccaaaatcagattgttttcacagttatgattcccagtgggagaaaaatgcctcaatatatttgtaaccttaagaagagtatttttttgttaatactaagatgttcaaacttagacatgattaggtcatacattctcaggggttcaaatttccttctaccattcaaatgttttatcaacagcaaacttcagccgtttcactttttgttggagaaaaatagtagattttaatttgactcacagtttgaagcattctgtgatcccctggttactgagttaaaaaataaaaaagtacgagttagacatatgaaatggttatgaacgcttttgtgctgctgatttttaatgctgtaaagttttcctgtgtttagcttgttgaaatgttttgcatctgtcaattaaggaaaaaaaaaatcactctatgttgccccactttagagccctgtgtgccaccctgtgttcctgtgattgcaatgtgagaccgaatgtaatatggaaaacctaccagtggggtgtggttgtgccctgagcacgtgtgtaaaggactggggaggcgtgtcttgaaaaagcaactgcagaaattccttatgatgattgtgtgcaagttagttaacatgaaccttcatttgtaaattttttaaaatttcttttataatatgctttccgcagtcctaactatgctgcgttttataatagctttttcccttctgttctgttcatgtagcacagataagcattgcacttggtaccatgctttacctcatttcaagaaaatatgcttaacagagaggaaaaaaatgtggtttggccttgctgctgttttgatttatggaatttgaaaaagataattataatgcctgcaatgtgtcatatactcgcacaacttaaataggtcatttttgtctgtggcatttttactgtttgtgaaagtatgaaacagatttgttaactgaactcttaattatgtttttaaaatgtttgttatatttcttttcttttttcttttatattacgtgaagtgatgaaatttagaatgacctctaacactcctgtaattgtcttttaaaatactgatatttttatttgttaataatactttgccctcagaaagattctgataccctgccttgacaacatgaaacttgaggctgctttggttcatgaatccaggtgttcccccggcagtcggcttcttcagtcgctccctggaggcaggtgggcactgcagaggatcactggaatccagatcgagcgcagttcatgcacaaggccccgttgatttaaaatattggatcttgctctgttagggtgtctaatccctttacacaagattgaagccaccaaactgagaccttgatacctttttttaactgcatctgaaattatgttaagagtctttaacccatttgcattatctgcagaagagaaactcatgtcatgtttattacctatatggttgttttaattacatttgaataattatatttttccaaccactgattacttttcaggaatttaattatttccagataaatttctttattttatattgtacatgaaaagttttaaagatatgtttaagaccaagactattaaaatgatttttaaagttgttggagacgccaatagcaatatctaggaaatttgcattgagaccattgtattttccactagcagtgaaaatgatttttcacaactaacttgtaaatatattttaatcattacttctttttttctagtccatttttatttggacatcaaccacagacaatttaaattttatagatgcactaagaattcactgcagcagcaggttacatagcaaaaatgcaaaggtgaacaggaagtaaatttctggcttttctgctgtaaatagtgaaggaaaattactaaaatcaagtaaaactaatgcatattatttgattgacaataaaatatttaccatcacatgctgcagctgttttttaaggaacatgatgtcattcattcatacagtaatcatgctgcagaaatttgcagtctgcaccttatggatcacaattacctttagttgttttttttgtaataattgtagccaagtaaatctccaataaagttatcgtctgttca

SEQ ID NO: 2022 - DNA, 19521 bp, Homo sapiens
cagaaggggaaagcgcttcctttaagcagtgctgagaagaggaaagccaaatgggaaagtctgcagaataaacaggtaatgagttaattgtactagcataacttagtatttgtttgagtattaaagattattaaagataagtttgaattttatcttaccaagttaaatgcatgattcgttaattttttagaagttacctaatcctcaaattttgttttgttttgttttaattagtattatgtgttgaatgttatttgaatgttctttttggtaagtattgagagttttgtttttatacttggcccattaatatatcacaaaatcattctcataaatcctttgataaatcccatttggccttagaggattatttttacaaatattttttaaaattaagttttactagcatttatgattttctttatccattagtgaaattggtctttttttttttcttttgtgtgtgcgctttgtatttatctgtccatttttccccttacttgaagatactggttccagaactctgtgctatacatccaattccagcatcactgtggagaaaagctgtttgtctccccagcatactttatcgccttcactgccttttgactgcagaggagctaagagcccagactgccagcgatgctggcgtgggagtcagatcacttcctgcggattttaggtatgcctgtgcagtcagccagaaagaacacagatcatgagatcctgtttgcaaaagaacagaattaagttaaaattgtatataaaataattcttaaaagagtaaaaagaaaataatggatatcttatgtcttgtcaagtctcagagggagatgagaatctgaggtcagaaataaccattactgcttaagccataacagttggagtgagaatgaaattgttctttgttactgcatcagcattttcagtctgttttttcttttaaaaatccaaatatatgttaaaaagcaatagccttagcatgttctttgtcttcattattttcttcccattagtaaaatctctgcattctaaagaaactgttggcttaaacactcacattagttctggttatccaattggcaatatcaagactgttctagggattgaaggaattttaaaatataataggaataaccacaatatttattggttagttgctatagtgccaaacactagcttaaatgctgtaccctgtgttagttagctcatttaatcattaagacagtgctatgagataggaattgttagcccttttctcaggtgcagaagctgaggcacagagagtttatgtaagttgcccagagttactcagcgggttaaccagagtgcctgggattccaacccgtgaagctaggccccaggtcctgcaggatgcctgcaagcttcgtgaccttcttaactaccacacctagagtctagggccagggattaaagcagtagataaaaccatgtcccactttataatttacactgtaaattaaaaatttggaaacttgcttctattctaaagtttaggagtacatttttgggatctttgtttttgtttttaaattcaaattgctgttgctctcagcctagctgttttgaagaatctgatgtaaagttataaaaatgtctttgcagataccctaacttagacttcgggtggaaaaaatctattgacagcaaatctttcatctcaatttctaactcctcttcagctgaaaatgataattactgtaagcacagcacaattgtccctgaaaatgctgcacatcaaggtgctaatagaacctcctctctagaaaatcatgaccaaatgtctgtgaactgcagaacgttgctcagcgagtcccctggtaagctccacgttgaagtttcagcagatcttacagcaattaatggtctttcttacaatcaaaatctcgccaatggcagttatgatttagctaacagagacttttgccaaggaaatcagctaaattactacaagcaggaaatacccgtgcaaccaactacctcatattccattcagaatttatacagttacgagaaccagccccagcccagcgatgaatgtactctcctgagtaataaataccttgatggaaatgctaacaaatctacctcagatggaagtcctgtgatggccgtaatgcctggtacgacagacactattcaagtgctcaagggcaggatggattctgagcagagcccttctattgggtactcctcaaggactcttggccccaatcctggacttattcttcaggctttgactctgtcaaacgctagtgatggatttaacctggagcggcttgaaatgcttggcgactcctttttaaagcatgccatcaccacatatctattttgcacttaccctgatgcgcatgagggccgcctttcatatatgagaagcaaaaaggtaagagatgatttttttattttgagcagttaattattcagtgtgcctgaaagtggtttgcagtgttggataatctcagaggatgagaacgtatcatgctcagaaattgctacaccggccaagcacagctgctcccttgttctaccagggccagcgaaagcctgtggcagaactacctggcagttgatgagtattgctttacaccaatcccacactcaggttttggggcttagctgatctccacgtgccttactttttgattgaaagtcagttcaaaggaagctatgcaagtgtgtacaccccttgatcctgagggggatatgaagaaatgtgcattgtagtcagtcaaggagcttctgctttgttgagttaaacatttatttgagagggtacgtcttggcttacaaggcatacagacatgagtaagacacaagtcttgtggaggagctcatctccaaagttttggagagtggagcggagaagagtaacaagcttcacagagcttggctgctctccagtgtgaagagggtgacaccagagttctgagtaattaacgctcgatagctcagagaaagggcgggctcttaaactcagcatggactaagacttaagaaaaggaatgaaggtaagatattcaagttatgggggaaaaatggaaaaaagtctcacaaggcaacatgagcctcctggacaaataccttagaaagctgctgatcacttgcagcactcagaaggaaggagcatcactgttgaatcaaggatggcattaatggaggaggcaagttgacagtgcataagcaaagtgaacagatggcagagcatgtcagcgtcagggaagcagccgtggcagcagtcagaagtgtggaaatacctgagaaaaggcttgaaaaggcagctggggtgaagctgtatcgtggaaggccttgaatgctgggctaaggagtttgcacgtgttttgaatgttgtaggcactgttgaaggaatttagagcaaggaactattaatgttaataaagtggtagtttaaaatgattaatctggtagcagaatgtagtgtgagttgaaaagcatatccaaaccaacagcagaagcagagaatgggatagaactagagttctggtagagaggaaggggctgaggtgagtgagaatttcagaagaaataattttagctaacaatttaaaagtgcttactctgcactactctaaaagataaccgtatacgcacacacacgtacacacacccacatatatacacatatatgcatataaacctaatttaatttttataattctgagaggtagaaacttttattttccccattttataggtgagaataggctggagaagttagcttgcccaaggtcacttggcaagtaagtggcagagcttgggtcgaatccagacagcctggctttggagaccttccccttccccatcacactaactgctccggatagaaccatcacaccaggcagcacaccaagcatttcccaagtgctcactcattcactcttctctaagcctctgggaaagagacaacacatccctgttttgcagatgaggggactcacacttagagagtcgaatgggctcctgtcaggtcacctaactgttcatctgggagagtcaggagtgtgtccaaggcctcccaggatgatcttgaggtggactggaggcgcagtcataacaaccacgtaaactggcaacttgggggcagtggcagtagcagggaggtagggagaaatgtgggaagtccatgttagagttgagattttagacctcatggaatatgaagtggaaatgttcagataattgaggctgtaggattcagatacggttttgtagagtagtcgccatacggaagctctgagaatggatgagatttccaagaggtggttgcaggaagaaagtatcagaggcttggacaagtgtggcataggcaataggataggatactctgttagacaagacagaggtgactttctattacaaaactcgtccatttgtctgctcagaaaccttctactccttatttctgcagaaagaatgatcactccctcagcctgctgttcaggccctttcagccctgatgcgttttggatcctaagcaggtggaagccccttgcagctcattggacagactccacgctcagacccccagccttggggcccttgctctgtccttccttctgcagagggcttgcctccatctctacctgtccagaattttgccccatatttgagaccttacgtagctctttcttcatcctgcccaccatttctgtcaacttggaatgtgatttccctcccatgagtccacgttgtactttatcctcttcttggcgcttgtgatgctttgttctcttagcttggaaagggaagctagcatttatttcagcctgctacgtttcaggcagagagggagagtacttttggctatagtggtcacacgtaccctccttttccctgctagcctgtgtgtcacgaggactgcccctctgtcctgctgccatcgttccctcagggttgcccaatcgagtgcctctcatatggggggtgtctattaaacaatagttgagttacatgggaagagggctaatgaagtacttaataataaggaaccgagctttatgaaaatgaaaatgggattgacaattctagaccctagtttccaagtactaacttgacagaaatgcaatgatgtgagaaattaagaaggagatagaggcattaggaaaaacagaccggagtagagggtaagatagtaaagctgttccattaatgtgaataaacagaaaccttttggttcattttttttaagttgaataaaagtgtcttgaaatggctgtaaaacaaaggaataatatttgagagagcattacagttgaaatcccgtttgtggcttcgattctaggaatataacattgtttcagttttgttcggtgccagttttcactttgcagctagagctgatggcatcctccccccatttcattgaaaatattgtgacatcttgactttttctatgggttcttttctactttggtaattccagttagcagtttgcattttatatcatcaggttgtattttcaaggctttgatattgtctgaagtgtttcttctcagtcattcataaggagtatgcatagttatatacattattttttctgctctgcatcttatattcagaaatatttacaccaaaaaagcatagaatatgtgggaatttaatattctttttataacatgaatgggtagaaaaactgtagagcccttataattaattgatgacatataattaattgattaattttaagaacatttaactgaggatatgttaatatgccttgaatgaattccagcagtgatcatttatggataagtatcctaatattttctgctaaaggtcagcaactgtaatctgtatcgccttggaaaaaagaagggactacccagccgcatggtggtgtcaatatttgatccccctgtgaattggcttcctcctggttatgtagtaaatcaagacaaaagcaacacagataaatgggaaaaagatgaaatggtaagtttttgtgtgtgtgtgtgtgtgtgtgtgtgtgtgtgtgtaactggagggatttacttttcggtgagccaaataatttgttttattaattttttgtttcattttcttggtatgtttataatagagtagatatttgatatatttaattaattcctttaattacactgtcttttcactgaattcagaaatagtattataattttgatggaggcaaatttctatttttattatttcttttccaaaggcataagagtatgtgatgttttgactttgagttttgctcttctttaaaaaaatttcactttgctgttattacaatttatcctagatccttagctctgttcagtgaaatgacttttcagtgacctgtgatctccagtctgtctgtgaaataattaatttcagtaaaatcttgcttttgtagctcagggttttcccagtcaggactcctgtgaacttaaaaaaaaaaaatcatccataaagattgttattttctggaaataatttaaatcttgccagtgacttaagaagactccaaatatcagcaacagccgcttcattttgtcttgtcttgaaggccaccagagggcacttgggagggcctccaaactgcaggaaccagcgcagtggtggttgactgggagagttctagtgcctcttccgaagttaaaggcaatgcttcagacagtttcatttcttggagatttattttgcattaaaaataaattggctcattgttacttcatttttacctcaggccaacaatgataataccgtttttttctttcaaaggttatatttttaaatatccattttctccatgtcttctttgtgatgcatgtatcctatatatctgcctttaagtatttccaggtagcatgttcagtgacactatttggatttttacctatttattgaggatgtttttaactcatgtagtatttgtcttattacagaattagaacttatttggaaaagcattaagggaatattttaatgcaagttaggtccgaacaattatttgttattaatttagaaatatgtagaaccttagaggaaaatgtatagattttcaactttagaaatggtatggtatttctatgaataacattccagtaacagtcatcctcctttgttaataccgtttcataatgtttttggctctttttaaaaacttgtagcatgaaggtgacattggcatgtcattgattttttttttaagatacaacacaaagttcaatttatttttcttaatgtttctgatggcactttggttattggaattcattagaaatactgttcagatttttatttagtaagttacttttattgaaatataggcccttgcattatattgaaaagatacactgtggttttggctggttgcattgccattctccctaccttgctctggcccttcagcaaatgggcttaagtggaaacctttgcatgctaaaacgcctcttaatagacgagagtatcaaagttgacttgaatgatatagaaaaggatttcatgtggctgttttttcttaaaaggcttgaagtgctcttgaaaaacattttatgagacagaaccccactcttttgtagatgaagcatctgaaacccagaggcactaaaaggctttgcccaggatcacacagtttgtgataaaagtcagccctttgtgatttttgtgctctgccacttttggcttatggtggcacctttctaaagatacagaaggtttttttcaataaaaaaaaaatattgtctgattttttaaaaatcgcagtttggccctctttttcttaaggaccaatcaaaaacatcttcatgttgccttggaaagtctaagattgttagcaggaaatgttccttgaggtctgccgctacagttgcttttggtgttccttattcttgaaaaggtgtttctttcttaattaaaaaaatgaaaagataaatagttagagatatggcttggcttactgctatttcttttcagacaaatgtagtgtttatatcttgagtctagtttaaaatatttgtagtatttaaaaaatgcttgaaggttgcaacttttttttgtcagaacactggaaagttgttacaatcaacattgatgcacacccttcgtcttcccccttcacaagttttttggttttttaaaaacttgcataacagaaatttggcatctttctaggattgcaaagaagttacatcattactgaaatctagcccattattaaggttgtcactcacaaataagcttttgccaaagaaattggaattagcaaagatcttttgacagaaattggattgttgtgtttcatgttagtctaaattttcttccatttttgtcagttatgctataatctgttcccctgattaccgtagttcagagtggagggaaaaagcgtaacttctcaaattcatagcttagtgcagtgatcacttttattttttaaggaaagcagtgtagtttttttgtggcaagtatactttgaagtggaaatagggacaaaaagctttattataaaatcctattgtacattttaaaaaatgattttatctgtttttatattatattcttaattgcaaaggtaatgcttttctacatctggaatttcgttttattagtttgaaaatctttttgaaaatcaaattaccacattttcaaattttgtcagcaaaattgaagatctgtgtgatcagcatatgagtgctttcattgtgtgtcctaccagagttagacgacttagttgaagttttgcattgtggacattaattttaactttatatccatgttcaaagtccttaacttaaagcttcatactggataaaggtcattttataacttagaaaacgaacattcaaagaacatgttttactttgtttatatgattaaataacttattttatgttaattgaaaacaaatggccatgattttaaagttgccttttagtatttgtggttgtcatttgaaattatccataacccttgcttttattgagtttcaaacccttttaaaaacagcagctatgtttcccctccttccccattccccctcgtttcagacaaaagactgcatgctggcgaatggcaaactggatgaggattacgaggaggaggatgaggaggaggagagcctgatgtggagggctccgaaggaagaggctgactatgaagatgatttcctggagtatgatcaggaacatatcagatttatagataatatgttaatggggtcaggagcttttgtaaagaaaatctctctttctcctttttcaaccactgattctgcatatgaatggaaaatgcccaaaaaatcctccttaggtagtatgccattttcatcagattttgaggattttgactacagctcttgggatgcaatgtgctatctggatcctagcaaagctgttgaagaagatgactttgtggtggggttctggaatccatcagaagaaaactgtggtgttgacacgggaaagcagtccatttcttacgacttgcacactgagcagtgtattgctgacaaaagcatagcggactgtgtggaagccctgctgggctgctatttaaccagctgtggggagagggctgctcagcttttcctctgttcactggggctgaaggtgctcccggtaattaaaaggactgatcgggaaaaggccctgtgccctactcgggagaatttcaacagccaacaaaagaacctttcagtgagctgtgctgctgcttctgtggccagttcacgctcttctgtattgaaagactcggaatatggttgtttgaagattccaccaagatgtatgtttgatcatccagatgcagataaaacactgaatcaccttatatcggggtttgaaaattttgaaaagaaaatcaactacagattcaagaataaggcttaccttctccaggcttttacacatgcctcctaccactacaatactatcactggtaaggagcccacgaccagacttcatttctgggaaaatgagactttgtgttgatctcatcgtgttggccttgtaaaagtgatctatgcatgtacagtgttcatgcttaatattcaagggatggggcggggaacaaaaggaatagaaagaattcttttccttgttatttggggagcacgtattgctttataactttggttgttgggagtatggctatcatataccctcatcagtgtcattttatatctgcctaattagagaaattttaaccttagtattttgatgtgttttccccattttatcctccgcaaatatctttctcttgcccattcagtgctgcttttggtttttgatttagttgtatattctggatgtatttccacagccttttattgttcttcctggacaaaaagacccctcctttagggtctttttaaagatggatagattaaaagattaaaagcaatgatttcacaagaaggttgcgtggcccttgctgtgactctgctgtcatcttctacttctcactgtgctctgtatttgcccctcttttaatagactgtcaacccattagattagaagggagaacaagcccctcacacccaaatcagcttcaggctgtgaaacacagctgaagtttacatttcaatttctgtatcagaaaaataagtgcctgaattcagaacaccaaagcaaagtataaagtttgtagtttatataataaaagcagcgtaggttaaggtgatcagcaaaatgtaaaaaccaaaaagtgaaaaactatctgactctggactggaaagactgatgaaactaaagcctaattttcgttatggaggaaaaatgatacgtggctttcgactacattctgctggaagttccgagacctgggttctcgcctagcagtccctgcttctaaattccttgcttattctgggacaagtcaccatcggtccctgcctcagtttcctcagctggatatattattttaatcactgtgagaaaatagaggtgttgatttaacattgatcattttcacattttgacaaccagtttacctgcctttgctccctttcacaactcttctttctcaatctcttggtttgtggtaaattcatttctataatagctcaagttaagaagagggtcttcttttcctgtcatcctgtgtaacaaaaatagcccaggaatagtgaggaatggtatcacttatgcacagattccagagtgtgaatgagactttagcgatggcagcacagtgtagccacatggagaggtgtgtgcggccctggtttcacttaagtgatgatgtgtgagggagactcgagaggaaggccccagcacctgcccagacagcacagtgccagagaaaagcattcagtgatcatgatagcacctgtgaggttttgtttttccttcttaacaagcgttagtcttttgaccacttgaagattttatgaccccagtttatataagagatgtacttaatttgtcattaaaatttagtttccagaggctttttagtatgatatgtcagatatcctttttgaagaatatatgtatgaaaatgattgtaaatacaaatcttcttcggatttggggatcagttgctatgtggggatagtgtaaatgcttctgcacaagcttacggttccacttcggatcccctcagattgttaccagcgcttagaattcctgggagatgcgattttggactacctcataaccaagcacctttatgaagacccgcggcagcactccccgggggtcctgacagacctgcggtctgccctggtcaacaacaccatctttgcatcgctggctgtaaagtacgactaccacaagtacttcaaagctgtctctcctgagctcttccatgtcattgatgactttgtgcagtttcagcttgagaagaatgaaatgcaaggaatggattctgaggttagtgctgttcaaaacgatgttgaaaaaagtggtctaactaggagtctctgtagtttcagagttctgacggcatagtggtctaaagggacagcaggaggtcaggggtgtgggacccagtgtgctgtgttctgtgggagcacgagtgaactgcagtttgcaggtaggcctcttgaacttgtctgcccccactgtgggctgtgtggtcattcaggtgaagagaaggaaccaggcctttcagttaggtacccttcccacgccttcatgagggcttccagcattgaggcatgccaaagaagtggcctccactgccggaccccaaggcaggtttagctttagtaaaagcccagtgtagcttatccttccttttttaaatggatcagaaatatttgctaatatctcagggaagcatcataaatatacattctgcttctacttgaagtgggaaaatctaatttaaaaaacaaacttctaaatttttgaccattggaatttgggaggcttctattgtaagttcagccaaaggctgtctggtgacagagctaattctaatgtgtttgtgagctatttcgaatttttgtaggaaaggatattgcttagatctttccagtctcttaacattcatctgcatacctgtgtcccccagagagactctcatttcctcctcttcccatttcatttcctttgattttcttatttttgtagattttcttataaggagtcaggaaatacaaccttaatactagtagctgttttagttgtcattgctttaatttgtaccttcccctttttaattgcaccaaacctttgttggggagtagtgactttctatgacaaaaattaagagtaggtttgaagtctagccgcagagccgagttcacgccctgccagctgcccagatgtgcactggaggagtcagtaggccctgctcttactttaacgcgcctctgtgctcttgtccaagatgaacagcctgagctggagcgtggcaggctgtgaggcgagaaggcgggaccagctcgtagacttccaagtgttacctagtctcattctttagaaatagctaagcttgaaatttgaggaattagttaaaattagatttaagctctctttggatgccagtggggcatattggttttgttagtttttgttcattcttttccttccctttgtttatataaacatatgtatagaagttacaagaactgattggaaatgtcatggtctggcatttctaacttactatttgatcttaagaaagtctctttacctctctgggcctccgtttcctcagctgtaaaaagagagaattaaacttggtaagttttaaaattcctttctatctcaaaaccataaatatgaacaataagtctgtttttttaagtaatcagcagtataaatgtattatatgtaactttgtatggctaaacaacctattagaaattagtattttcccactttctctttatttttttcacaaatgatttgtgttgattttagaaaagttagtacaagtaaataagaagaaaattagttaaatttgcctgattatgctacctcggaaataaccaatattaacattttgggaggaattgtggatgtgtatagatataaacatatctaaaatgtaaaatggaattctattatgtataggatactgtcacctgttcttttcacgtataatatattgtggctgactttccgtgtattgatgggtatcgtgatgctcaggggccacacgctagtcaacacgtggctgattgatttaaacgcttctttatggccgagtaattaagtagtttttggttaggatgtttaataaccatggaggtgataaatacgcttatgtatctagttacctccttaaaataagttcttagagatgcaattgctgcatcaaagaattgtgaacttttcaaaggcttttgatgcatgattttcttttattaatttgcatacatgctatgtcagatactcggttatagtgaacacatatctagtggcttaatgaagagggaacttggaggaaaaaatctttcaaatataatttccctatttccctacaacagcgatttctgctccccaaagcagcatacacccgtgccagcaccagaccaattagtactattgaatgcttgccaagcagctagggagtagaactgttttaaagtatagttctttgattacgagtgaatttgaatttttttcatacttttattgactatttctaattctttgttaaggttgtttaaagttagaagtaatcttttttctttgctgggtatatagaataataaatggggtggggatattttttctttttttcttgagaagtttgaaaaacttttttaaaaatataacatttgttttactattacaatatagtaggcataccataaatggtatttccccccttactaaagaagtaacaaaagtcatatatccaagaaaagaaactacatctgtggactgcctgtaaaagtggcctttttgcttacaagtcacttttccctctgtaatagcttaggagatctgaggaggatgaagagaaagaagaggatattgaagttccaaaggccatgggggatatttttgagtcgcttgctggtgccatttacatggatagtgggatgtcactggagacagtctggcaggtgtactatcccatgatgcggccactaataggtattgttggctccctttagaaagaaaaaaacccacaaaattaaaaacaacttcagagatattattcatattattctttcattttgattgcagaaaagttttctgcaaatgtaccccgttcccctgtgcgagaattgcttgaaatggaaccagaaactgccaaatttaggtaagcaaaaaatgtacatggaaaaaacattaacttaaaaacatcaaaggggaaaagttcacaaagatattgtaaactaatgattctgaaaaatatttacactgtggtgtgctgttgtcagatttctgtttgtaatctgattgacttctcttttttccttctgtttttatgaaataatgctgtaataaagactagacggcagccctgtctgtcgggggtatgcaattgcagtaagtcgtaacgcgtgtttcctttgtgtggtgtcagcttatacatgggactcctggcctgagagtgcacactaaatgctgattgacaatgataataaatacttctgacttctaattcaagctgtttggattttttacagcccggctgagagaacttacgacgggaaggtcagagtcactgtggaagtagtaggaaaggggaaatttaaaggtgttggtcgaagttacaggattgccaaatctgcagcagcaagaagagccctccgaagcctcaaagctaatcaacctcaggttcccaatagctgaaaccgctttttaaaattcaaaacaagaaacaaaacaaaaaaaattaaggggaaaattatttaaatcggaaaggaagacttaaagttgatagtgagtggaatgaattgaaggcagaatttaaagtttggttgataacaggatagataacagaataaaacatttaacatatgtataaaattttggaactaattgtagttttagttttttgcgcaaacacaatcttatcttctttcctcacttctgctttgtttaaatcacaagagtgctttaatgatgacatttagcaagtgctcaaaataattgacaggttttgttttttttttttgagtttatgtcagctttgcttagtgttagaaggccatggagcttaaacctccagcagtccctaggatgatgtagattcttctccatctctccgtgtgtgcagtagtgccagtcctgcagtagttgataagctgaatagaaagataaggttttcgagaggagaagtgcgccaatgttgtcttttctttccacgttatactgtgtaaggtgatgttcccggtcgctgttgcacctgatagtaagggacagatttttaatgaacattggctggcatgttggtgaatcacattttagttttctgatgccacatagtcttgcataaaaaagggttcttgccttaaaagtgaaaccttcatggatagtctttaatctctgatctttttggaacaaactgttttacattcctttcattttattatgcattagacgttgagacagcgtgatacttacaactcactagtatagttgtaacttattacaggatcatactaaaatttctgtcatatgtatactgaagacattttaaaaaccagaatatgtagtctacggatattttttatcataaaaatgatctttggctaaacaccccattttactaaagtcctcctgccaggtagttcccactgatggaaatgtttatggcaaataattttgccttctaggctgttgctctaacaaaataaaccttagacatatcacacctaaaatatgctgcagattttataattgattggttacttatttaagaagcaaaacacagcacctttacccttagtctcctcacataaatttcttactatacttttcataatgttgcatgcatatttcacctaccaaagctgtgctgttaatgccgtgaaagtttaacgtttgcgataaactgccgtaattttgatacatctgtgatttaggtcattaatttagataaactagctcattatttccatctttggaaaaggaaaaaaaaaaaaacttctttaggcatttgcctaagtttctttaattagacttgtaggcactcttcacttaaatacctcagttcttcttttcttttgcatgcatttttcccctgtttggtgctatgtttatgtattatgcttgaaattttaattttttttttttttgcactgtaactataatacctcttaatttacctttttaaaagctgtgggtcagtcttgcactcccatcaacataccagtagaggtttgctgcaatttgccccgttaattatgcttgaagtttaagaaagctgagcagaggtgtctcatatttcccagcacatgattctgaacttgatgcttcatggaatgctgcatttatatgtaagtgacatttgaatactgtccttcctgctttatctgcatcatccacccacagagaaatgcctctgtgcgagtgcaccgacagaaaactgtcagctctgctttctaaggaaccctgagtgaggggggtattaagcttctccagtgttttttgttgtctccaatcttaaacttaaattgagatctaaattattaaacgagtttttgagcaaattaggtgacttgttttaaaaatatttaattccgatttggaaccttagatgtctatttgattttttaaaaaaccttaatgtaagatatgaccagttaaaacaaagcaattcttgaattatataactgtaaaagtgtgcagttaacaaggctggatgtgaattttattctgagggtgatttgtgatcaagtttaatcacaaatctcttaatatttataaactacctgatgccaggagcttagggctttgcattgtgtctaatacattgatcccagtgttacgggattctcttgattcctggcaccaaaatcagattgttttcacagttatgattcccagtgggagaaaaatgcctcaatatatttgtaaccttaagaagagtatttttttgttaatactaagatgttcaaacttagacatgattaggtcatacattctcaggggttcaaatttccttctaccattcaaatgttttatcaacagcaaacttcagccgtttcactttttgttggagaaaaatagtagattttaatttgactcacagtttgaagcattctgtgatcccctggttactgagttaaaaaataaaaaagtacgagttagacatatgaaatggttatgaacgcttttgtgctgctgatttttaatgctgtaaagttttcctgtgtttagcttgttgaaatgttttgcatctgtcaattaaggaaaaaaaaaatcactctatgttgccccactttagagccctgtgtgccaccctgtgttcctgtgattgcaatgtgagaccgaatgtaatatggaaaacctaccagtggggtgtggttgtgccctgagcgcgtgtgtaaaggactggggaggcgtgtcttgaaaaagcaactgcagaaattccttatgatgattgtgtgcaagttagttaacatgaaccttcatttgtaaattttttaaaatttcttttataatatgctttccgcagtcctaactatgctgcgttttataatagctttttcccttctgttctgttcatgtagcacagataagcattgcacttggtaccatgctttacctcatttcaagaaaatatgcttaacagagaggaaaaaaatgtggtttggccttgctgctgttttgatttatggaatttgaaaaagataattataatgcctgcaatgtgtcatatactcgcacaacttaaataggtcatttttgtctgtggcatttttactgtttgtgaaagtatgaaacagatttgttaactgaactcttaattatgtttttaaaatgtttgttatatttcttttcttttttcttttatattacgtgaagtgatgaaatttagaatgacctctaacactcctgtaattgtcttttaaaatactgatatttttatttgttaataatactttgccctcagaaagattctgataccctgccttgacaacatgaaacttgaggctgctttggttcatgaatccaggtgttcccccggcagtcggcttcttcagtcgctccctggaggcaggtgggcactgcagaggatcactggaatccagatcgagcgcagttcatgcacaaggccccgttgatttaaaatattggatcttgctctgttagggtgtctaatccctttacacaagattgaagccaccaaactgagaccttgatacctttttttaactgcatctgaaattatgttaagagtctttaacccatttgcattatctgcagaagagaaactcatgtcatgtttattacctatatggttgttttaattacatttgaataattatatttttccaaccactgattacttttcaggaatttaattatttccagataaatttctttattttatattgtacatgaaaagttttaaagatatgtttaagaccaagactattaaaatgatttttaaagttgttggagacgccaatagcaatatctaggaaatttgcattgagaccattgtattttccactagcagtgaaaatgatttttcacaactaacttgtaaatatattttaatcattacttctttttttctagtccatttttatttggacatcaaccacagacaatttaaattttatagatgcactaagaattcactgcagcagcaggttacatagcaaaaatgcaaaggtgaacaggaagtaaatttctggcttttctgctgtaaatagtgaaggaaaattactaaaatcaagtaaaactaatgcatattatttgattgacaataaaatatttaccatcacatgctgcagctgttttttaaggaacatgatgtcattcattcatacagtaatcatgctgcagaaatttgcagtctgcaccttatggatcacaattacctttagttgttttttttgtaataattgtagccaagtaaatctccaataaagttatcgtctgttca

SEQ ID NO: 2023 - DNA, 126 bp, Homo sapiens
agggattcaccagcctcagcctcccgagtagctgggactacaggcgcccgccaccacgccaggctaattttttgtatttttagtagagaaggggtttcaccatgttacccaggatggtcttgatct

SEQ ID NO: 2024 - DNA, 126 bp, Homo sapiens; identical to SEQ ID NO: 2023

SEQ ID NO: 2025 - DNA, 10417 bp, Homo sapiens
aaagttttgaagaagaccttaaaacctacaaagctattgaaaaggtaagatcaacatattaacatgtgccggcagattgggaaaaaaaattaatgtggcttctttgttattctttgtatccataggaacagataatgagttttatctacaggcaataatctcaaaagaggtgtactctgtgtacattgtaaggaagttgagaatgatcacaaagacccggcagtgttatacaaagtgtttgaaagggcacaataagataacagtgaaaatgatcatcacatatgttatttgggatgaacgtctgggaaattgcattgcaaatatggacagtaactgttgactgcttaagttattgagtgattggaaaatgatgacatggtagttacattcagaaagactaacagtcgtgtgtgtgtgtgtgtgtgtgtgtgtgtgtgtctgtgtaggcacggtacagtatagactttgtaccatatggtaagggtctccatacgattggaactgggagggattcattggaagaaggtgtctgcagcaggttactttggagtactgaagtatgtttaggagagagagagatattttcaggagagttttttctgtaggtacagaggcagacagcatacagcagagaggatgtgttttcatcataagttctgttttttaaatgttcagatcttgagaaacaagtgttccaagtcggttgatactggtgagactgacattgatcctgtcatggatgatgatgacgttttcccaccatatgtgttgaggcctgacgatggtggtccacgagtcacaatcaacacggccattggacacatcaataggtatggcatcatatcatttgtgtggaaaacctgggaatgttgcacagtttaagtctaaacctgtacattttgtattgttgacattttgcggttaccagtctttacttagacttgccatattttcgataaagaaaagttacttcttttttcatttttttttaaatcaaaaggcaaaaacagtatcgtgcagcaataaaagttcagtattccttggcaaggctaacataatgaaggcattttaaattaggtttaatttaattttataattctcaccaatttttttctaaatcctgaaattttttgttttgtgccataaccattgggtaatgttgaattttcccctagcaataaagtaagattgtgataaactaatttatgtttttgggtacattgtaatttactttgtccagagctgataataaaatttctaagagctaagaacagcaaatgcattcctggattatataccaggataatttctattcagagacaaaagagcaagtataagattttctttgtaaccttttattttgaaacaatttcaaactttaaagtgttgtaagaatactagaattccgcatatgcctttcacccagacaccaagagagactcattcagtttcatgagaatgttctttgtagccaaagtatctaccttagagtcaggagttgtcctcaactcctgttgtcacatcttcctagtctccttcaatctggaaccattctttagtctctccttgactttaatgaccttgaaactttggaagatagataggctgtcattttgtagtcttactgtcagtctgggtttgtctgctattttcttatgatgagacccaggttacaaatttttgggcagcacatcactgagacgatggtgtcctctcctcatcctagcttaccaagtcgcacaccatgttgatttgtgcccttaccggtggtaacttagatcacttgagtgaagtctgccagttttctctactgtaaagttccctttcaccccttttataattagtagatatttcatggggagatactttgagacggtataaaatttgttccttttcccagtttgactcattagtgtaagcattctttgatatttctggcccaaattgattattactatgatggctactaaatgattttctaactccattatttctgtatttattagttggcattctaccatccatttcttctctccgtttattcattcttatattatcattttttaatgtcagtgtgaacttatggactcctgttttatttaatgggttataatctatcattatcatttactgtttgttttgatgttaaaattgtttcatatttggccagtgggaaccccttaaagctggtttctttgtctttttaacatctcactattattccttgaatacttccttgttttatggcgcaagacattctagactgccccagccttgatgttggcaatttcctcgaatttagtggagaaaaagttgtagttagaaaccaagaactggatactaggtttattcattgctaccggtgtgttgctgctgccaggcgttttagtggacagagctagaatgtttgtttgttcatgtttacatctgtatttgtttcagtgtctatctgttgatatctctattttcagtgtgacactagaggtttcattctagatttcctcctttctgtctttgtacctcctttctctaataatcagaaatttggctcccattgtcctcaaaataattagtgttcagtcttcctgtatgtagccagtctccctgctctgtagggctgcaactgtggtcaggtgcccttgctgcacaggtcgcaacctcacagggctgctgcccattccagcaccctcctgatgtgggtcctgtcccagcatccctttctgggctagctttctgccctgttccaaccttccctggtgctgttgctcagtgagttgctagttctactgtcctttttgtgtcagcactgggctgtcccgccctctgctgatgccttccttatatgtgtgctggtagttggtgggaaatgtaagatgattaaggaaaaaacattggcagtatgttttcttactggattctgaacaatactttgtgctctattatggtaacactcgacacatgttactatttaaattcaaaattcaatttaaaataaaataaaaaatggagtttcgtagttgtacttctcacatttcaagtgctcaccagccactgccctgttgggcatcgaagatatagaacatctttgcagaagttctgttagacaacactattctgtcttattcgaagtttgaagcagtaaagtttaaatgccacatataaatacaaattcagtagaggggaagaggcacatgacaaatcaaactcgaggttataaatatcaatattttctcagttgtagattcagcctcagaatttctttttcttcacagatactgtgctagattaccaagtgatccgtttactcatctagctcctaaatgcagaacccgagagttgcctgatggtacattttattcaactctttatctgccaattaactcacctcttcgagcctccattgttgtaagtttagaagaagaaatgattgttatcttttaaaatgtgtcattagtggattttttcagcttttctaagacttgcaagttataggtaaatttgattttaaaatctactttcatgagcaggagccttgtgttgacagaccaaaaataaaaataaaaaccaaatttactttcaaaagtagatttatagattgcttttgtagtcatctacatgttcatatttgtaatagactgtctaatttacagatacttagaactggactaggtgatctctgaagtttcttctaaggtgttactaacatgcacatttttgacagaatcattcaactgtggcttagacacttagagtaatataaaacttattatagatcgttgcgttgtcctagttattttgttggtgactcaaaaatctgctttttgtaaatactgttcttggtctcagtactgatttccaagtgttccaaggtgactaatttctattgcacataaaaagctgctcaatactgttaatgttatagctatgttttgataaatctttctttttgttacatatttattgattagtaaaaataagatactttaaaatcttactgaaatttaaattcatcaaaattgtaaaatcttaattatgacttagtttttactaggcaggacttttaaagatgaatatttcaaatatggagattagaatttttaaaaacttgctggaatttttcaaaataaagaattttgttttggtaaattgaactttaaaaatgttggggcagtggtttcataggtgtttcatgtgctagaggtaatacagcgatgtgcatatataatggaaaggtttttgttattttcagggtccaccaatgagctgtgtacgattggctgaaagagttgtagctctcatttgctgtgagaaactgcacaaaattggtaaggatgtttgaaaagcatatacgaatgaaaataaattgcaaccattgtaaaaaaaaagcatatagaggactttatagatctgtaaggattttgtagagctattcacttgctgatcttaatgtgctttggtgaatataaacataagtgttagtaacttgaagatcctacattgttgtgggagctctttgttttccatagcttgactgcaaacaactgtcatttatttgctctctttaatgactccttttaagtacataaaggtcttttcgtaattgttgaatcatgcaccatgaacacttgtgttttaatatgtcagtctctcaaattagtctatactagtatagaaattaatccttttttaaaaaatgaactcagtttcttttttttttttttctcaatcctgctcctgtataagtggacccattttctatggccattttatttagcattgatatgtggtgatgtcatgtttagatgtttttgtttctgaaccttagaacagaatttgcagtccagctcatattggaatatatggatgccaaaatagactttgcctgaagtgtgaatctgattacttttaaattgtaaaaggcaaaggtgctttagtttccattacttttccaggtccttctaacatagttctgttctaaattctttactaattaatcaggcaaaatctggattgtgttaattctctctttaaatttgttaggcgaactggatgaccatttgatgccagttgggaaagagactgttaaatatgaagaggagcttgatttgcatgatgaagaagagaccagtgttccaggaagaccaggttccacgaaacgaaggcagtgctacccaaaagcagttagtattggttagaacagagtaaaaacctagcatttctgactttgttttccgctacatcaaatctcagttcctctgcttggctggcttcccacacccttacagtttggcccactctggatctcagctcctttctccgattcacagcttctctcagatcagcctctttccttcctaatgtagaatgtgtgctcttccacttcagaggttgcttttgtttttcttctcaaaaggattcttggacccatctgtcatattctatccagaatgagattatttcatttaaatagacattctttgtttcattcagtttagtggtgtgattcttgttttacttatgatttggggctaagacagaagaggatttgtgtgataaaataagcaagtgaaaagatgccctctcaagatgacaggtacactggaaggtagaagcacaaatatctgtcaggagttatgtcagattcccagtgtgggccattgggaatcgaaataagttatttccatggagtgtttccagctcaatctgtgggcatcctagcagagttcacacatgaaagcatctctaaatctaacttctagtaatagacaaacttggctgaagtatttatttttaaaatatttgttaatatttttacctcataagaaccccaagcaaaagcagaattttgctgtgtgtagtagtcccgcttacccttggagggtatgttccaagacccacagtggaaactgcagatagtaccgatcctccagcagctcaacgttgtttcattagaacgttgacaaggaaaaaaaaaatcgttcccagccagggccactgtctctatgtggggttggcacattctcctcatgtctgcttactccggtttcctactacatcccaaaactgtgcacatcaggtgaactggcgtgtctgcactgccccactgtgagtgagcatggggatgcatgtgcgtgtgccctgccacagagtggtgtcctgtccgggatgggttcctgcatggggccctgagctgccaggatagactctggcacccttggccctgaactggaataagtgggtgaataatcatcttccttgtttttattcatctttcttaagtgtatctatagctcacatttattttaatgcttaatattaaaagtgtttttttttaatttagaaatttggtgatgtttttgtgatcagaaatgtgctggaggaatttaactgatttatgtcaattagcctgtgggaaaattggtttctttctaccaattggttgtttcccttagccagtttctaagaacctgccgaagacattaagtgaggacttacagcatatattatgctttttaaaatacgtttgtacatatttatgatagtttaagatataaattaggcacagtaataacaaaatagaacaattgtaaccatatactgtaataaaagttatgtgaatgtggtctctctcaaaatactgtactgtacacacctgttattggaccgtgactgacctcaggttactgaaaccatggaggctgcagataagcggggactgctgtgcctgtatgttagcctaaatatgtgtttctttggttttgcttatgcagttttaccaagtttttactttataaaattttgcacccagcttagcattttcaagattcagaatcatgtttttaaaaaatcatgaatgttacccattttcccaaaatgcatgttttcctcataccaaattttcacgtgagactagtttcatgtgataaagtcgttaatgataagtgtttctaaaagcatagtattggctgggtgtggtggttcacacctgtgatcccagcattttaggaggctgaggcaggaggatcacttgaggccaggaatccgagaccagcctggtcaacatagtgagaccttgtctctacaaaaaaagaaaagcatagtactgcctggcatcctgtttaattaatagatacattctttattttctgattctctattaaatataactgtctcttttaccagcatttttgtaccttttaactacagatgcagttctttttcattgaacctcaggaactgcaagaccataatctgaaggattgtgttaatattgaaagcctagcagcaatgtccatttaattatggttcactcacataatgaggtagccattacaaatgatgatattggctcatattgactcggacagatattctctttacagtaacgggataaaaatcaggctatctcacaaacacagatacacacataccctaatatacaccagtgttgtgtgattttatttgtattgaaaaatataaatgtatatatgtttctatgtatttatgcatagaaaaagagtctaggaattatacagtgtatcaaaatgttaataaaggctgtctttgagtgataggattatatgtgattttttaaaaatttgcctaacttcattttctgatactctacagttaatacataaaaagcccaaggaagagatgagttttcttgtcagaagaaatagatcaaatgaatagtatttttaaaaaggccctacagtgttggattgttttatgtataattttggtattagctatgtagtcagcactgcattataatgtatgtgaacttgggccaccgtcagcagccctgtcctgagatccgctgacttacccagcagggttaagtaattaagaagtgtcatgcctcgggtattttcttagcttattctcatcagcttttagtaaagccagaattaatttgttttcttgctgacatctggaaaagaggctaatatgcttgagcatgacgcttaattttcctttccaactctagattccagagtgtttgagggatagttatcccagacctgatcagccctgttacctgtatgtgataggaatggttttaactacacctttacctgatgaactcaactttagaaggcggaagctctatcctcctgaagataccacaagatgctttggaatactgacggccaaacccatacctcaggtaggtatttcataatgagtacttatgtcaaaaacgtcttgcttaggaaaaggaaaaaaaaaaaaactagtagtaagtaccttttgttacctcagtatgtttaatatttaaagatcgaggtgcctcttctatttctccactagaaagcatcatttctgttctgaagttaactgtaatggaataaaatacctgttaattttgaggggtgctttacatttccttttgctaagattccacactttcctgtgtacacacgctctggagaggttaccatatccattgagttgaagaagtctggtttcatgttgtctctacaaatgcttgagttgattacaagacttcaccagtatatattctcacatattcttcggcttgaaaaacctgcactagaatttaaacctacagacgctgattcagcatactgtgttctacctcttaatgttggtaagaaaaaaatctcttactttgataactctagacacatatacaaacatacagctttggtatgaaacttatctgtatcatgttttaacaagctaaagagtcgtttttctcttctaagttaatgactccagcactttggatattgactttaaattcatggaagatattgagaagtctgaagctcgcataggcattcccagtacaaagtatacaaaagaaacaccctttgtttttaaattagaagattaccaagatgccgttatcattccaaggtaggtatttaaatggaaaggaaaatggtggtgatactttgttttaaaagatgcactaggtcgggcacggtggctcacgcctgcagtcccagcactttgggaggccaaggcgggcagatcatgaggtcaggagattgagaccatcctggccagcatggtgaaacctcgtctctactaaaaatacaaaaaattagccaggcgtggtggtgcacgcctgtagtcccagttactcgggaggctgaggcagggcaatcacttcaagctaggaggcggagattgcagtgagctgagatcgctccactgcactccagcctggagacacaccaagactctgtctcaaaaaaaaaaaaaaaattcacttattcacatgggaatataagtgggctgtgattttagcattgtaattactaataggaaatatattagtcagtcaggcatggtgatgcgtgctgtaatcacagctactcagggctgaggtgggaagattgcttcagcccaggatttctaggctgtgcagtaagctgtgatcacaccactacactccagcctgggcaacagatcggggaaaagaaagaaactcttaaggtcgacccgttctctccagtatacttgcttaaaaaataatacctaaaacgttatagataaggaattttcctttgtaaagggtcagataatctaatgttgataggctttcttcttaaaatctccatccttttagtctccagagtcttatagaatttgattataaataatgatttcatttcttaaaatttttataaggaatattaagctctgtgaaaatagtaaatccagaatgatttttttccttattttataaaaatttagggaatggagttttggggcaatacaatacaggcagttttcaaataattataatactagttgtaattcaatctttgattttttttttctttttgcacctcaaaaccatattttaaatgttagttatcaggaccatcactatcatagatgatgcagtaatacgttttatatgacaagtgtctttaatgtttagcattagtaatatacaaagtatttactctttggatagtgtaaattttttatactatttatatagatgaaatagatatgtaaaggtgccatttagcttcatgtgttatcaaaatgtagatatttagaacaagaataataataaaatgggacaataatgtgtccatttttacttgataaaaatacagttcttacatacttgaaatatatttggaatacagatgtttattgttacttatttttaatcttttgaattcttaatcatcatttccatactacaaacagttgtattttgagaatagttgatttaaatcaaaaagcaactgattgtttttttgtttttcttttttagatatcgcaattttgatcagcctcatcgattttatgtagctgatgtgtacactgatcttaccccactcagtaaatttccttcccctgagtatgaaacttttgcagaatattataaaacaaagtacaaccttgacctaaccaatct

SEQ ID NO: 2026 - DNA, 2471 bp, Homo sapiens
gtactgtgttggcttgttttgcagtgagacttattctgagattaagagctgcatttagcttcttggccaccaggatcccagagtaaattacttttcaggactctaaatagtacgcaggagatttgaaagaactgatgcaatttctaaagcagcctgacttcctcccaggaggttactcccacaccaagcctctgacttcatgaccaccagatttagaaattgaagtatctatgtaagaagttgcctcctaggcagaaatcaagaaatccaactataacataggttagagtccattttggtttttatatccttccacagaggaaagaggaggaagaatctggagatgcgtttttggtttttggttttttgtttttttttttttccagaggctcatgtatatcctacatcatggtcagtttcagagcagggctgtgccaccatctcagtgactcctggaatactaaattggatctttgtagaggaagaaaataacacagttctagattttccctagctgttaattagttttatggcataattaaaatagctcaggagtaaaaacaaagtccagccttaacagcctgttaagtcttcttttcttatcttgaaaagaggtaagataatgaagtttaaacagttgaagaagttaaccggaaaggaattaacatttcaaggccttgccgcttcttcctcctcttgtgatatgaaccagaattgagggaaaataggcaggagggaacccacactgaattttccagactctactgctgaaagacattgtatatttttattgtaatcatatgtgatgcaagataatattgctcatatctgaatcccaaaagaaaagaagatgtttgtctgagcatcccatgaggtaagcagccccatggaaggaccagctgcatccagcaaagggctccaggtccctgacgtagttgacggtgatggcagaagtaaatctttgtattcttgcagagactttgtttctgaaagaggccaaaagtcatttcaaactgaatctgacggataagataggggccatagctgagaaaaataagtagcgaagccgatctaaaccaaggtgtaactgtgaaatagtaaccatcttctttgcacgtttcaaaattggccctggacgccatcgcaagaggaaaattccaaagctgtgcagcagcggcagtaccattggaagagtttacagcctaccaggactacttagaaggggatcatgtttatttggatatataacccctgattggtttgttttaaaaataaacgttattatgttagtgtcatacctcatggtttccttggaacattctcctctaatcctctttgagagagtgggagggagagattgtgaggggagagagaagtgttaaacagagatgttcctaaggaggaccaggaatcctaaattacctaaataacccacttggttatctccactccttgatagcactgtgtgaggtatgatgcagtcaggtaaaggacaatttatctttgaagacaaagataaattcgagtccccattttcaagagtcagtgagaagtaacagcttgtttgtgtggcactgattgatccttgtccgggcaagtggtccctccacaggttatccggcttggcacacaacagacagaggtgctggcggactgtggaaccagacccgctgtggttcccctcctcaccctgccacttcctagctgtgcatcttggacaactgattgaatcttgtgcctcatttttctgtagaattgaaacaataccctgacccattgggcaatggagatcaaatggcattgatgcaggtaacatgcttaacacagggcctggtatgtagtgggcattcagtaagtggaagttacgattattattaggtatcaaagaacaaaacttaattgtcagaataagcaaaccagttggaataataaacgtagcctttagagttaaatggcacaaccctgatagccacacataaactgttttggttatttttcgttggatattcccagtctttatttctacatccctcttcaggctgagtgcttaaaatacatttatatgtagtctcaattagattatgctgtttcccccaaaagactacagtgactattattttaatttatagaacctcgaattgcatggaatagctaccacatctccctttaaacctggtagcttccaaaacttcctgatggcgttttcgcaaatgggtccctatgtgtcattgaaggagacagtgtatctaggaaaagaaatgaggatactgagcaaggtgttggtggctcatgcctataattccagcattttgggagactaaggcaggtagctagcttgaggccaggagttcaagaccagcctggccaacacaatgagaccccatctccacaaaaaaaaaaaaaaaaaaccctaaaaattatccaggcataatggtgcatactagtagtcctaactactcaggaggttaaag

SEQ ID NO: 2027 - DNA, 2471 bp, Homo sapiens
gtactgtgttggcttgttttgcagtgagacttattctgagattaagagctgcatttagcttcttggccaccaggatcccagagtaaattacttttcaggactctaaatagtacgcaggagatttgaaagaactgatgcaatttctaaagcagcctgacttcctcccaggaggttactcccacaccaagcctctgacttcatgaccaccagatttagaaattgaagtatctatgtaagaagttgcctcctaggcagaaatcaagaaatccaactataacataggttagagtccattttggtttttatatccttccacagaggaaagaggaggaagaatctggagatgcgtttttggtttttggttttttgtttttttttttttccagaggctcatgtatatcctacatcatggtcagtttcagagcagggctgtgccaccatctcagtgactcctggaatactaaattggatctttgtagaggaagaaaataacacagttctagattttccctagctgttaattagttttatggcataattaaaatagctcaggagtaaaaacaaagtccagccttaacagcctgttaagtcttcttttcttatcttgaaaagaggtaagataatgaagtttaaacagttgaagaagttaaccggaaaggaattaacatttcaaggccttgccgcttcttcctcctcttgtgatatgaaccagaattgagggaaaataggcaggagggaacccacactgaattttccagactctactgctgaaagacattgtatatttttattgtaatcatatgtgatgcaagataatattgctcatatctgaatcccaaaagaaaagaagatgtttgtctgagcatcccatgaggtaagcagccccatggaaggaccagctgcatccagcaaagggctccaggtccctgacgtagttgacggtgatggcagaagtaaatctttgtattcttgcagagactttgtttctgaaagaggccaaaagtcatttcaaactgaatctgacggataagataggggccatagctgagaaaaataagtagcgaagccgatctaaaccaaggtgtaactgtgaaatagtaaccatcttctttgcacgtttcaaaattggccctggacgccatcgcaagaggaaaattccaaagctgtgcagcagcggcagtaccattggaagagtttacagcctaccaggactacttagaaggggatcatgtttatttggatatataacccctgattggtttgttttaaaaataaacgttattatgttagtgtcatacctcatggtttccttggaacattctcctctaatcctctttgagagagtgggagggagagattgtgaggggagagagaagtgttaaacagagatgttcctaaggaggaccaggaatcctaaattacctaaataacccacttggttatctccactccttgatagcactgtgtgaggtatgatgcagtcaggtaaaggacaatttatctttgaagacaaagataaattcgagtccccattttcaagagtcagtgagaagtaacagcttgtttgtgtggcactgattgatccttgtccgggcaagtggtccctccacaggttatccggcttggcacacaacagacagaggtgctggcggactgtggaaccagacccgctgtggttcccctcctcaccctgccacttcctagctgtgcatcttggacaactgattgaatcttgtgcctcatttttctgtggaattgaaacaataccctgacccattgggcaatggagatcaaatggcattgatgcaggtaacatgcttaacacagggcctggtatgtagtgggcattcagtaagtggaagttacgattattattaggtatcaaagaacaaaacttaattgtcagaataagcaaaccagttggaataataaacgtagcctttagagttaaatggcacaaccctgatagccacacataaactgttttggttatttttcgttggatattcccagtctttatttctacatccctcttcaggctgagtgcttaaaatacatttatatgtagtctcaattagattatgctgtttcccccaaaagactacagtgactattattttaatttatagaacctcgaattgcatggaatagctaccacatctccctttaaacctggtagcttccaaaacttcctgatggcgttttcgcaaatgggtccctatgtgtcattgaaggagacagtgtatctaggaaaagaaatgaggatactgagcaaggtgttggtggctcatgcctataattccagcattttgggagactaaggcaggtagctagcttgaggccaggagttcaagaccagcctggccaacacaatgagaccccatctccacaaaaaaaaaaaaaaaaaaccctaaaaattatccaggcataatggtgcatactagtagtcctaactactcaggaggttaaag

SEQ ID NO: 2028 - DNA, 467 bp, Homo sapiens
attggaagctaaaagttataaagtaaaatacccaaagatttaattaaatcagtaagcatttgttgcatttttaaccagaattctttaatcatttcctgacagaatgactgtgtattagatctctgcctcattgaaattgtctaggccccctgcatctgttttgagcaagacttcagttgagttccatcttttcattcttttacagtctgtaaaggcctggtgagtcagcgcattgaaaatcagtcatcatcttctgtctatgagttcttagtggcccgtacattattttctcagatccctgcatcattacaatttccatgtgtttaagtctcttctttatgttttttaaaaaaacaagtgaagccagtttctcaaacaggaggtgctcacattctatttattctccaagtgtggagtttgtgcccagcatgtgaccgacaatacagaatgaaaagcacatgacaagc

SEQ ID NO: 2029 - DNA, 467 bp, Homo sapiens; identical to SEQ ID NO: 2028

SEQ ID NO: 2030 - DNA, 25426 bp, Homo sapiens
  misc_feature (8427)..(8427): n equals a,t,g, or c
  misc_feature (22142)..(22142): n equals a,t,g, or c
aagaatacaaagttccagatggaatggttggattcagtaagtaacttgatttttaaagttttgaaaacatgatcaaaacatactttagaatctttcaaccaaaaaaaaaatttttttttttctaactagtaattggcagaggaggtgaacagatctcacgcatacaacaggaatctggatgcaaaatacagatagctcctggtaatgttacattctcatggtattttcagtgtgactagaaaactagcttttttttttttttaagccttctagtaacaataatgctacttttaatcttttgacctgaagttatctgtttgttttaaattgtagacagtggtggccttccagaaaggtcctgtatgttaactggaacacctgaatctgtccagtaagtttgaaaaatcttaaaaatctacttaagtaacaacagcagaactctttgaattttgtctcttctctttgttactgctttattttacactgtggtttcgctgccaccttccctcaaagtcctccaactcctttgaagtttatgcctcatgcctttctcaggtggggttcatcatctgaatcattaaacacagaaaatggttaaaacaactccatatctactccagtctctacttgtaaagccacgtgtagcctggagaagaatgcacagtcaggtcgactggtgacacttaaaactcagacattaagctcaagtggactgttgtgttgcctgcatttccctagttccattcacttttccactcctctcccaggctctttaatactgtatttccccacctccaaatcttcagcatctaaccccacgctctcccacttaagcttatttactgagaaaatggaagcaaatgataagaagcttttctttttccctaccactaaacctaccagccttcatttttcctctgttcacatagtactcaggtaattgctttccttttgtgttcgagtgcctaaagccagccctttcttcctactgaaggttcagcttgcagttgtactttcttctgcattgttagttctccctcattactaggttttttcttttcttttttttgagacgaagtctcgctctgttgccaggctggagtgcaggggcacgatctcggctcactgcaacctccgcctcccgagtagctgggactaccggtgcatgccaccacacccagctaatttttgtatttttttagtagagacagggtttcaccatgttggccgggatggtctcaatctcttgacctcgtgatccacccacctcggcctcccaaagtcctgggattacaggcgtgagccacttcccccagcctgattttctttatggcactttccaaataatgtgttattcatttgacatgttatttttacttatttaatgaaatgaagccactctagcaggaaccctgtttctttgagtgctattaccccattacctagaatagcacctgcacatagttgatatttaaatatttgttgaatgaataattgtagcatatgagtaagcaaaatggtagtttaaaaatgtaaataaatcatttagttcttggaagaatcagtttaattctgagataactttagcattagagttctttcttggaaattttggactattcttaaaaataaaaattgtatatctagaaaatttttttgcataatctctcaatctttgacccttgatggcattttctttcagttaaaagtaaaagcattgttaaagttagcatcaaggcacctaatcctgaactgggataggaggagtacttggttatattgttttatatttctctatttgaataagcttgggtatgctacagcttactatttaaatattaatttgttaacaggtcagcaaaacggttactggaccagattgttgaaaaaggaagaccagctcctggcttccatcatggcgatggaccgggaaatgcagttcaagaaatcatgattccagctagcaaggcaggattagtcattggaaaagggggagaaactattaaacagcttcaggtattgttatttttgtgaaatggctacttttgatctgttttgatgcccatttttgtccacttcttttgttaatatatattatttctatgattgtaacaggaacgggctggagttaaaatggttatgattcaagacgggccgcagaacactggtgctgacaaacctcttaggattacaggagacccatataaagttcaagtaaacttaactttatactttataaagaaagagtgggttgaatggggttgggcaaaatatgcatgaataattaaaatgttttgagacatgctttctaaattagctaactttttctgctttagcaagccaaggaaatggtgttagagttaattcgtgatcaaggcggtttcagagaagttcggaatgagtatgggtcaagaataggaggaaatgaagggatagatgtaagtaaaaatacccattcagaaatggttgtatgctaattcataaatataatagtgttttctgttttgtgttaagtagctctaacattgttatccttttatttcacctttatactttagaatacagaattctatatatcttgttaccctatttactataaatatagaattatatgtacttttatgatttgaggcagattttcaggaaatggcgcttttttaaaatacttttttttactttaaaccctgagaagctagctttcttaatacttagtcttttttacataaggtccccattccaagatttgctgttggcattgtaataggaagaaatggagagatgatcaaaaaaatacaaaatgatgctggtgttcgcattcagtttaagccaggtgagtacatataataatcttgtaagtgttggcagcagtgagttttgacatacatttattgtttaattaattttgtttctttgttttgaagatgatgggacaacacccgaaaggatagcacaaataacaggacctccagaccgatgtcaacatgctgcagaaattattacagaccttcttcgaagtgttcaggtttgatagaaagttaacattttcattttttgtttttatggaaaagtattttccttcatgaaatctgaagttacctctatatcagagtctgcttgatgatgctttattaatggagaaagtttaaattgctttaaggtaaagatcttggagcaggaagaactactaccttaagtgctaccttatttactcttgtagttttaaaaaatgttattactttattagggcccagttcatctctacatttcctgatcaggtatatgagagctgggaaaaataaacttaataattttatcatgaaacaaaagtatttctgtgctgactcttcgttcttgtctttccctctctataggctggtaatcctggtggacctggacctggtggtcgaggaagaggtagaggtcaaggcaactggaacatgggaccacctggtggactacaggaatttaattttattgtgccaactgggaaaactggattaataataggaaaaggcaatgtattttaaactcttaatgttttaacacattattcatttttctggacactttctgttgctgtcgtaaacaagtggcaatgctttttctctgaccgtattttagtagaaaagaattcttatgttaatatgtaacaagtaaaacataaatgagggatctcatgtatatttagagaaagagcaggattttaatcttactagcttctagagaaagcgaactaagagataattattagcataagaaatgtcttttgacccaaaaagtggtttgagtgtttttgtttgtgcattttggtttttcccgactcatattttaaaaatttgaatgtttataagtgtattagtttatatttacactgcttttaaaagcagttaattcaaatattttattataatcacattaagtttatgtttaaacatactaagtaaatgtaaatgtattttaagagaagcatgaaatgcttcctaaaatttgattttcagtgtagaatattaaatgaaaaatcttaatacaatattgtcaattaggatactgaccaaaccatatttttaatggcccatttaattgtgaccattttcttctaaatagctcctagtacacccttgaaacctttagagaaattactgtcttttgattttaggaggtgaaaccataaaaagcataagccagcagtctggtgcaagaatagaacttcagagaaatcctccaccaaatgcagatcctaatatgaagttatttacaattcgtggcactccacaacagatagactatgctcggcaactcatagaagaaaagattggtgtgagtatactttaaacttttaatttttagtgtagacccttagactgtagttaaattaagacgtttattcaaatacatcaaaggaaaatgtatcattactagtcagcatttatagatttcatgatatgtataatagatacaacgtgaagattttccagcaatgaaaataacctaattaaatgtgtagttacaggttttgagaacaaccttacatttgggtgtggctagataagaggagggtagtgttacctgtaggcatgatattagtgttggtgtaggattgtggaacatacttgaaggacatagttaacgggaattcattatttattaagattttactctactgaaccccagcgaggcaaacaagataaatcagatacatctgccactctacagtagaaattcataaatcctaggttttggactggctcacagatcatctgggggtattaaaatgtagactatttgggtgcttcccactcctacacataatatacagagacagacctgactcaaaatgtctgggatagggcccagcatctaattttacatagatgtttgggtgattctggtgcacagacaaatttggaaatttttcctccaggaaagttttctgttagaacaaaaaagtatgaaacgctttgactgcttttttgtaagtgaggcagacagtgtcttactggagtttttaacacaaagtgtgcagggggcatcttaaattattagaattgcctaggaaaaattatttttggtgtttgccatgctgtgaatggggtgcgtgcaaaacaaggttgacactgtttctgtcacacttgggaagaacacaaatagatgtacaaaagacgcttaaggaacgtcttactaaatgtacacaaacattgtgagttctgttgtatggatagtttaatggttcaaaaaatgaagaggatgtttgtagagtaatgatagaggttgatgccatggcaaaaaaatgaatagcactcatcttggttttttattttacagtattagcctaacatgcatgcgtcaggatttctgttggattcatggaaaaacaagatagattgttttggagaagcaatttggtgtggtgattaagagcatggactctgtagtcgggttgcctcagttcagaattctgtgaatcatttactggttctgtgaccttggagaagttactcaggcttttctgtgccttggtttcctcctgtaaaatgaagataatggtatctacttcatagagttgtagggattaaatgaatgttcatgtgtgtgtcacttaaaagaatgcctgccacataaccctaaaaaatgttgctactttttcagtattatttttactacttggaaagaataggtcatggatagtaagtgagagatgacagcaattggagatttaaagagacaagttaatagaagaactttaaaggtcatgaagtttagtttccctattttgcagtgagaaattgacgaccaaatgtagtgttagcattttgtccaacatgtcgcctggttgtgttaactactcagaaggagcattttaggacagttaagtgtaatgtctttgttggcttaaccaaacagaaatcagttaagcgttattaatgatgtggcatgcatgcatgataaggatataaaatatcctgatttattgaaggaattaaaaagggaatttttgtgctattaaacatcatgatacatgaaaggccaaaaaggatataaattattgatctgaatgggattttagtgacagaaataggttgtgaggtggattttagtttcatagtgaaacaactagctattaacgttatcagtgaaatgttcagaagacgatgatacaggacccaagcggtttgggaatatattgtcaagacggttgtctcatgttaggcaagtagatatagagagaagagctgaagataaggacctgatttctgtgagtaagatggaaaaagatagtaaaagtaagaatgataaaaggaaagggaactactgctgtccgcaaacaagctaaaggaaatttaattgctaatttaaatttaatttaatttaaattgcatttaattgctactgctattgattttagtgaattttacatgtctcattattatggcagatgaaatagtttttgcaaaatgaatgaggaaaggaaggaaaacctaaaatttgttatttgtgactataagagggtagaaatggatgattatttggccgtagagttgtttaaccattactgtgtttttctgatttttctatgtcatccttttttttgtagggcccagtaaatcctttagggccacctgtaccccatgggccccatggtgtcccaggcccccatggacctcctgggcctccagggcctggaactccaatgggaccatacaaccctgcaccttataatcctggaccaccaggcccggctcctcagtaagtattgggtttagttctgggctttccccaaagattctagttttgggactgttttttatgctgatttttcttttcagtggtcctccagccccatatgctccccagggatggggaaatgcatatccacactggcagcagcaggctcctcctgatccaggtagaagatgcttattatttgtgtgttatctgtattattttccactcctgttacattattaaattttctagtgttgattctacatttgtatgcatcaccttcactcactttactctttcaacagtgttaggcactgcctctaccccagtgtataggactgacatgaatatgagctctgcttttatggaatttctttctacttgcctttggcttatgagttgatacagtagaatgataaaagctaaaagctgcaggaaagagcacagtgtcataggttttggataccagtgctgtcaaatgtgtagtatgttcattgtgacattatctgtggaaaaatagtttttacttatttagaaaagtatgtgataggggctgggcactgaggctcacgtctgtaatcccacctattcagaagtctgaggctgaggcttgagaccagcctgggcaatatggcaagacccatctctaaaaaaatttgttttaaattagccgggcagggtggtatgtgcctgtacttgaggctgaggtgggaggattgcttgagcctagaagttctagattgtattgagctgtgggcacaccattgcactcccctgggcaacagaatgggatcccatctcttaaaaaattatgtatatatgtaacagtctatataaatatatatatataacagtccaacagagtgttaagtattggggcattaaacttccaaattgtcaaataagatatctgttctagtactcctcatatgacaacttcatgtgagtaaaaatcaggcctgtatttaataactgcatgctaaagcccaaatacgtttaattattttctatattcagatttatttttatcctattatattctggcatctttccataccctgtagtttgctttccatcttggtcaaagagtcattctttgaaaccaattaacatttatttatgatccttttttctcacctgctacctaccttttaggcctctttcactcgtgtagtttcaaggaaaatatactcaattatggaatactttctacacataatacatttatcccaaaaaaacttgaagtaatttatgtaaatgaaattgcttgattaacttcataggaagtgtgctgtttggaatatgatgacacagcatgacagttaccaagcatgacttgagttgtgctaggatataggtgtgcaaagttggggttgtgttctatagcaaaagaatgcactcccagcgtaagcaacactgatggaaggggctcacagggtacaggatataatactcttaacaactaatttttggagaatgaaagggcttttctttccctcttgttggctgattgggatggtataattaatgggattgaagagtttgagtaggttaaaaggcagattcatattgggtaacttggatctgcccaagattgtatttttgaaccactactggggtgttagcatgattgaggaaaaatgatgggaataagaagtggaagtggtctttggtattcacaagttgaattcctccacttggagntagtagtgaaatccattactgtaagagctggtcagtgaaatgtggttgcagcatggcctttgggcaagaagtaacccatttaactaaaaccagctggttggccccactcagatttatcaaagggttactgggtccctgggggtggatattgcttatattagacttagaatagcatactgttttaatattatatgaactaaaatgtttctttaaaaaaagagtggtctgttaatggatttatgtagtggtcaagaatttagacttcagagtcaaataaacctatatcagtcctagtcctacagtttactaattgtgagatgtcaagcaagtttttgaactcctctaagcctctgttttcttatctataaattaataaatgaatgaatcgggttgagtgaatatttagtaaattcttagtacatactagttatttgtaactgtgagactggttttttggtatggttttcacatttgggagtagaaataccacttcctaaagtctgttttatctcaaattctctatccaggcatagtgtaaagtgaaatacctagatttcttgattaatatacagataatggccagacgccatggctaaaacctgtgacgctagcacttcggaaggctgaggcgggcggatcacttgaggtcaggagttggagaccagcctggcaaacatggcgaaaccctgtctctactaaaaatacaaaaattagctggatgtggtggcaggtgtctgtaatcccagctacttaggaggctgagacaggagaactccttgagaattgctccactgccctccagcctgggcaacagagtgagacacttcatctcaaaaaaaaaaaaaaaatacagataatgacactattgagatatgtaaacatccaacataaaaaagcagtacattgggcaattgagaaaagtttggcaggtgtcctaataacaccttacaattatattaccttgcaattttctttttctagaaattcttgctcatttttctcaaacttgactaacctttattaagcagctgagaattgctactgttcagaatgaaggtataatagaaaatttaaaagttttaattgtatggtattcctagtataaaagacaatcaagttttttctggtttctagaagattgaaaggtctcaaactgttcgcacttcagttgatgtgggagatgagtgagggtcagtcaagtgtagaggagacaacatagctaaaagccgagacacgggcatagtgatttctgaaaagtacaagcactgtgttgtggctggagcttgggtgttgaagagatacaaccaaagggagagatgaggctgaaatggaaaggataagccaggggcttcaggctgttaaagatgttgaatgataggctgtacttaagctttgaacatcctgaagattgcagagaatgaagaatttcaagtaggatgacatcaagtttataacattcaatgtgaaataggatgaaatgtggctaatcttttttaagatttttatattttctcttcattgaaaataaggacaaagttcattgttctaaaataattttctttcttatacaggttagtccctagaaatgtttttctttagtcatcttctagatagagctgtttgtgcttgaggcgaaaccaatttagaaaaaaacaagggcacaggatggtttgagacagagcattggatttggagccaaaagacctgtattcatatcccagttatgccactcagtagtttttaacctaggaaagtcacttagtctctgagacttggttttctttaataaaagctgatggtgacaacaaaaataatagaaaatttaagttttcatatactttttttaatgttctagttaattttgggggctgtatatttgccagagagctgggcgggggggtggtgtgtgtgtgtgtgagagagaattacagacttcacatgcaaaccttgaactttcatttattttagctaaggcaggaacggatccaaattcagcagcttgggctgcttattacgctcactattatcaacagcaagcacagccaccaccagcagcccctgcaggtgcaccaactacaactcaaactaatggacaaggtaactacagaacttattgtatgtgaaagccaaaagttgtgcttggaattatatatgaagtacatcactgtataatacctaaaatttctgacattatttaattataatttaagcagacttttccttttttaaattgttactttgaaatagtttcaaactttcataaaagttgtaagaagaatacccggagcacccagatagcccagctgttaatgttttattcccttgtttactctgttaccatctatatcatacatgtgtatctgtatttattttaaatatccattataattagttctgaaggaagctaattatatccagcataattagttctgaaagaaatcactgaagactaaactgtagacatgatgtcctgttgggtacttcttcaaaaatacataaccatcatacagccctccaaatcagtaagtcaacattgatatattaagttctttatatcattatggatttctgatttttgcagtaggttatatttttaaagtatttttataattttgataatcagattatcctggatttggccagtcagggagtatattcagggtggtgcctatatccttttgaaatacctgtcattcttttaagcacttccatactgtctggcacagtaagattgttattttgtgctttctgggctccagccctcgagtcagctatttcttcaaggagctcttattccttttagtagagtatggtagttagaaacgagacttgagtatgcttgttgctactgaggtgtaattgcttctagcttctttcaacaggcagaactaggaaatatatttacatacatgcatacctacatacacacaccaaaaaacacataaacatcgatatatgtatatatttttaaaaactatgttcatatcaccacatccgtttcagcattttggggttttcaagccttttccttttttgtacttgtttacaaacgtgagaaacctggtgtcctcagtgtatttccttatttgacatgcatttacttatatgttcaacataaccagtcttcaaacaggttggttttcttttctgtccaccacctctgtacccccagtaccttctatctttggcactgttagggatgccaccaccacatagtacttccctcctaccctcactgtcacattgcaggcccctgccagctcctgcacccaaggaaacggccaaaattgccttttaaaaactttaattctgttttttgttttgttttgcttgaacaaggagatcagcagaatccagccccagctggacaggttgattataccaaggcttgggaagagtactacaagaaaatgggtatgttttatacatttcttgaaaatacatacttaattaaattgaaacaaattattctcttcaggaagagaataattgaataaaatcactggacttgtaaacatatcaagacagttgtaaattatagtttttaaatttgtggttatatggcaaggaaatttttttttctaattgcatttgtcaaccagttattaattgaaactagaaatgtccttactggtacatacaatattaacattactatacttttgacaatgacagttatatatattatcagtctaaatgacataaggttaaattttaatgtgtcaggcgaaaattgtgtgtgataccattatttttgctgcaagataagcaggtaagaagtaatctgcagtgacggaaagtaaccaagtgatggaaccagaatctggcttcaagagggtctgagtcccaagcttgtctcccaaatttgtctctttaggaaccatttggaacctgatactatacttctggacaaatcactatatttcagctgcttttgctcttagtcatttaaaattattacataccacagctagatgtcacaaatgaaagctaaattggtaagcttggttatccttcactagcagaaaaagaacctataggtggtagagttttgtcataagagaacggtctacttgggattttcaatgttttctttgccaaagaatgtttctcattctccacagaaagaaaaatttccagaaaggtgatgattttaatcttctagatgtaaaattacatatacctgatgataaagttgttttgcacaactggtttctttttaaagaaaaattgtttttcctcttagaatggcttcctaggagagtcatgttccgtctctttctgaggctttaacagattatgtttttgtgacctagcttaggcagatctacagtagctacaattcggcaaaaagaaacttttaacttaaaaacagcatactctgattaaggttggttacataatttattttctgaactgggatcctttttagaatgaatagggatgctattaataatcatgccctgacagcattgtggtcaggacctgtaatcaacttaactttaattaaatagcatcaccattttaaaagacttgagcatgagccacgtgcggtggcacacacttgtagtcccagctgcttgggaggctaaggtggaaggattccttgaacacaggagattgaggccagccttggcatcatagtgagacctggtcacgtgtttgggttaaaaatcactaacttcaacttctattttctcaatgggtaatgtcccctagatagggtccctagttattattaagtaggtaaaaataaaggcttgttaatggatttaggtaattatggaggaatgagtttggcttctgtgctttattttaccatattgattatttgtaatatggccattaatacatttactgtttagtcttttttgtattactttttatgttttactcaaaatgagtgggtgggtggaattctaatttttattgttaagggaagacattttaccttgtctttaattttttatttttttttaccatttccctgccagttagagatactatactatactgtcttgaatcctctgtaggaaaacatggcatagaaataattaaataataattagatgttaaataataatgctgtatgactaaagaacctccttaccccaccttttctgttgttgttctgtagtaccacaataatcacttgttaattttatttatttatttatttgagagggagtctcactctcgcccaggctggagtgcggtggcgcaatctcagctcactgcaacctccgcctcccaggttcaagcgattctccggcctcatactcccaagtagctgggattacaggcgcctgctaccacatccggctgattttttgtatatttagtagatacgggctttcatcatgttggccaagctggtctcaaactcctgacctcaggtgatccacctgcctcagccttccaaagtgttgggattatgggtgtgagccactgcacccagcctcacctgttaattttatgagcaaaacagattagttgggcaagtccttcacatgcatatctcgttgttgttgttttttttaagacggagtcttggtcttactccccaagcaatggtgcgatttcgtctcagtgcaacctctgcttcctgggttcaagctattctcctgcctcaacttcccaagtagctgggattacaggcgcccaaccacacccagctaatttttgtatttttagtagagacagagtttcaccatgttggccaggctggtctcgaactcctgacctcaggtgatccacccgcctcagcctcgcaaagtgttgggattacaggtgtgagccactgcgcctggccacatgtgtatatcttaaaggaaataatgctaggtaatttagtcaggtgcttgatgagcatttgtcatcatcatacggagtcaatttgtctttttctataaaagttctttttgtaaatgattagttgcttaactgctttaatttcttctaggtaccttacctgtcatcaggatctttttaccacaaataagaaaccttaaagcataaaacttggttcagtcttcacatttcttaaatggaaggagaaagggaataatagggagatatctttatctcaaagccaactgttgttgacttttccagtggcaggggtatgatgctaggacttcagatttcctgattccccatcctagtgccccttttgccaaactaggcaggctttcacagcttttggagcctaatttaagtttttcttgttaagaacagaaaactccattcatagattttaatttgtcattatttgcttatttactgaaaaaaaaaaaaaactattgaaaacaggtgtgggttaagtttcccaaaattaggtttatatttcaaaacaattctaagttcccaaggataacaccaaactaagaggataaatttttattttatttttttttattttatttttttgagatggagcctttccctgtcgcccaggctgaagtgcagtggcatgatctcggctcacttgcagcatccacctcccaggttgaagcaattcttctgcctcagcctcccaagtagagaaaatcttgataagatttcagaggcttataaggaacagcagtaaagatgggtgtttttaaagctagaatacagggatttttttaagacccttaagagaacaaacagggtttcaaaatagaaaggagtaattcttgtttggagaagtgaagacatttgggaaaagtttgacttgaggaaggccattatgataaggactgatgtggtagactctgaaccctgaagaatctggtaccttaagcctaaaggagggtagagtgaggacttgtgggaaaggtacagttatatgggaagacaactgagtgtgaaaatctattcatgcaaggctggctcttaggctctaatagaatcttgcaagctaactctagagcaagtcttttatctttgggatgaaagaaatttaaggctaaactttatacattataattataaaactataataaatattagataatgttctactgaagtataaactcaactatctggcatcaaacagtaactaagccatgatcacaccactgccactgtgttctggcctagtgtgacagagcaagaccctgtctcaaaacaaaatccagtaactaaagagaggaataaggggagcgcaaggtaaggcagtacatgtctgaaggggcagggaaagagttctttctctacttccaactgggcaaaataaatcacatttgccctttagattggaagagtgaaataagcttttcttgaacatcttttaagattggagtgtcaaatattaccaacttatttaccaagaatttggtttttcttaaagtctaaagtgtttactattagctttccacagggatataggagtttgcagaggttgtagttttttaagggaacatcaatgaattttcttgatgcatatgcctgtttctaccattttacattgttaatttgcctctaaaatgagtaactcttacaatggggtttaaaacctgaagactattgattgctaccttgatcaggtttggtttcaagtgtgcaccctgtaagagacaatgtgtggttttattgctattgtcacaccagttttttagatattgaaacctgtttcagatttgcttgaattgtgtcttgtaagaggaaaatgttaaacttacttcctctttgagaacagttatttatagaagacaggaaaatatgagaatttttaatagtatatgagagttctctgttaccaagaaaagagggtttttttcaggcatttttaaagaatcataaatcttaaattctttcactcagttgctttgagtctgtgacctgttttacaatggtgatagactgctttctgaaactatgaaattggtcttgttggcatgctcctacaaacataaaaagagcttcctgtgtgtccatgctccagtatactcgtctatggtagttatttcacaaagccaagcgagttacaaacgaaataaaatagtgcttaagtaaagaaactgaataggagaacatatactctctcttctcaattttatatttagaaaaatataccttcagaaattggggaaataggcatcagacactcagcttcatcattttttaaaagtttgctgtatgcgctttatatgtatgttttttgtgtatgaaccatttcaaagtaagttgcagacaagacagtttgctctaaataaactcaatgtctgggcacagtggttgacgcctgtaatcccaggactttgggaggccaaggcaggtggatcacttgagtccaggagttcaggaccagcctggacaacatggcaaaaccccatctctacaaaaaaagagaaaaatgtcagctaggcatggtgggcctgtagtcccagctactctagaggctgaggtgggaggatcacctgagccctgggaggttgaggctgcagtgagccatgattgcaccgctgcactccagcctgggtggcagagtgagaccctgtctgaaaataaataccctcaatattatcacaaacatacagactatatttaaatttccatagttgtcaggaatatgtcttttgtcgtctgtgtgttttgtttaattcagagtacattcaagattcatgcgttgcatttcattgctatatttctttaatctcttaattcagcaaagtcaccttatttggaaaaagacctgattgtgaaagctgagttttatgtgttttcattgatcttgttctttattccttgtcaggttacttttaataacattgtgttgtaattggaataaattattaatacttttaacatcttattatgtgtgtgtgtacatacactttataggttactaatcaggaaaaagtcttggctaggtcttaatacagtctttaaatcattgcctttaagtgggcttaaagtttttcaaaaatgttctttttgtaattctggaatcgaattaagattatgcctaaatctttaccttccttagctaaagcagtgtggatttggggttgattctgtttttttactaataatgacgctctagaactaaaagttaacgattaattataaggcaaaaagaaaagagcgttctttttttttttctaattgcagagtagtttcctgacactactaaatgaatattttaaataaaacaggagtaattctgaccctctgtgcttttgtcttataacctgtacttacagtggatgtaattttatattaaagtttaggggtttttttttttggtcaacaagggcaaacacaagattattcaaaggcttgggagaaatattacaagaagcaaggtattgtttttattagaaatgagatgttgggcttataattgtggttacagcaacaaagttcttttttttcaaaggtcaggcagttcctgctccgactggggctcctccaggtggtcagccagattatagtgcagcctgggctgagtattatagacaacaagcagcctattatgcccagacaagtccccagggaatgccacagcatcctccagcacctcaggtataatgtaattgctaatttgttgatttctactccagtctgttttctgcatgtttactgtttgtctgtttgggagtgtttgccttttaaatttttatctggcaaagtataataactatttaaatgaagtactacggtgtattgtttgggtttttttgttttttataatgctttccagcatctgagtggtgaatatttctgcaatgcctttgattttaaaaataaattttcttcccccagggatttgcaaatcatgcaagaagccaccaccatttatattaaccactttttctttcttaaaggattcactcctgaattagctccatttcaaggattttctttaactttttgtgtatttcttatgtatctcttctgcacagggccaataataagaagtggacaatacagtatttgcttcattgtgtgggggaaaaaaacctttgttaaatatatggatgcagacgacttgatgaagatcttaattttgtttttggtttaaaatagtgtttccttttttttttttttttttgaaaatgtacaaaatatctatcactactgataggaggttaatatttctgtgtagaaatgaaaattggtttgtttttagtatttagtgtagatgtacacattccagcaaatgtatttgcaattatgtggttgatgctttgtgatataaatgtactttttcaatgtatactttcacttttaaaatgcctgttttgtgctttacaataaatgatatgaaacctcctgtgtcggtaagttggatatgtgggtatttaaaggattcataatttcttagcaatgataaattaagatacatatacacaaatatataagctttccccatgaaatattgagtttttaaacactggcatgtttttccccccttgcagtatagtggtagattggaggatcttttccatttattgtattggctctttcagcacaagtaatcctgatatcttcattttttttccttctgtttgattaaaaactgcatgtgtgtacaatgatcttttggcatacttccattgcattaacagtgaaatttccttttatacatgaccactgtttcagacctgtactgctgctataacagttaacctttctgttcttaatttgataatacttgatttccaagactgtttcggcataactaattttaaacagttttcagatagtgaatatgagtagtctaataagaacagtttttttccatgtgaagcaactctttcaatgtatataatgttagtgtgtttctttctaaatttaggatagaaaagtgaatagtgtgcaaaaagtatagctacattgcatctgccattgaaacataaatggggtatggaaacgttcaagctttttttttttctttatgcagtatagataagctttgttttgtaaatgcacaagtccaatcattgaatcaacttaatttttttatgtacttgaagtcattttattactctttaacactcatgctgaagttctgatattttgttgaaatccattgttttactctttgcatatttgttggctctttgcatattaatatattagactacatgcaaatacagtctgtcttgccattgtctgttgaagtgcaggtttgatccagccagtatagaactagctctgtaggggtgaggaggactgtgctgtgtatcatccttgattgtgttccttcaaggagcattgcactgtaagtacatcagaatgacaaattgcatgaactgcaacagtatctttttgtcaatgttccacataatgcaaatgccatacgttgtgtgatattatgttggaatacagtgctgatatcttggaaaaccataactgcctcttaatttaacatagaataatacatagttctgtattttttttaaagtgagcttaatgggtaagtattttttatatgctttagctatagctaaagaaaactgatacttaacaaagttgaatagtattattcactggtgctcctaaaatattgtttttcagtgtaaaatatgcatatcttctatatttaatatgaaagtcttgaaatgtatcagacagaaggggatttcagtttgcaaataatgagcaatgtagcaattttaacacatttcataaatatatattttgtcattggtggagagcaccatttgttgttttgaatatactttaaaggaagaggtacaaggacataaatgttgagattacctacaggatggaaatagcagtacagttcattgtagatattttgaaatgtttttgattgttttatataacctagagtgacttcccttacccttatttagatctgcatatatagttctagtatgaagtttaatagttaaggagttagctatttgttatctttaagagtagggtattgacgtgaacaattgcagtattttgcatgatactgttttatagatgaccttttaggaaagtggtgcatttattaattgaactgaagaagtagttcagttgaattcagtatcataattcacaattggaggctgttgattttgattcatttaaggtttaaaatctttattaattgcaaacagtgcaattatttatacttcacagtgccttcccagaccttccaccttaggttctgctgcaaaaagcaccaggtaagcacaacctaaggacatatataaataaatatttcaatacattaatgttgtccctgtgaggtttttgtggttgtgtattcaaaggcaatctgctactgcttccccaaaatgtattttgttattttatgctaccatcttagtggaaagtctgtaagttgttaaagcaactgtttacatttctgggtaatgttttttattttacttttttttttttattaagacaagaaaatgatgagtagattgctgcagtaattgaactacatccaaatctttttgtattttttccccaaatatagaagtgttaatattaagaaaggacaattacacagttttcaagatttaggaaatcacttgtttagaaacttcaacagccttcacaatctgttttatatgatggacagaaaatttctttgccctccaaaattataatttctttatttttttcttattcttaaactataataattcagtaaggatattatgggttagaattttattatgatttttttcttagacaaaagttatatgctgaagaaggaaaaagttataaggcagtatgttttgataaaaggcatgtgcatcagtgaaatgttaactgtatagcaaataacctttcataatctgtagcatcagtatttttctgatttaataatatttaataactgacgctgcatttaatttttttgccagtttaaaatgtttgtgtgtttttatagatgattttaactggtacatattttgagttaagttgaatgtatgaaagcagcatcttatcagttttgtttattcgatttctaaaatgtgctgatccttttaaaactcctgcttatctctgcaacaaagaaaaatattcaaaaatactgccttcattttcacacacagtgctgaagatgctgcaagcaccaaatcatagctcataaaatcaggtcctgagatagttacccataaagaggaatcctttgagtgtatgccattggtgagccgatgagcatggaccatagaagggctcaatgtagaaggtaaaattggcaaatcataattgagaaatatgaaatgtattcccatacataatatggtatagggtgtaatgtacctgcttttgatcacttttcattttaaagtgctattcacttgatcttaaatgttccatgaactgttaaatttcttaagttacatagttactacaccacatttatgtgtatgttatgttttaatagtcaatgataggtatgtacaattgataatataaaggggctcattgaaacttgagagcctgttgagttttggttagttgtagattgcatttttataaaaaaaaatacagatagattgatgataatagatattggggcattgtttctgtctcatgagaattcttttattcattaccataagccttcactgatactataagcattattttaaatgacgctgatcttaagtctgaaataaatggaaagcagaaaaggtgagccagttgatttgaatgcattggatattagtgttagaaacaatgtatagtttagattgaaactgaactgacttatttagcacttaaacaaaaattgacaatgtttntagttttttttaagacagcttagtgtggtgatacttagaattctatggtttgatgtttcttttagaaatgagaagtatagttttattttttaatataaaaaatggttttaatactaaaactagtaatttgatactagttgtttataaacattgtaaaatatatcttttaaacaaattatcttggtagttaattcataagggtgggtttgggtaggaatagcagagtactttcagagggaaaggggagtcattcagaagtgatagcattttatttgtttgaatactctgccagtaaaatcagctgtacttagaaagttatctgttgtgtagaataatgatgtagagtttactaatcagtgaggatgtcttgtttttattttctgcaaactctgcctcactttaaaatgcattataacaatacctaattaaagataattttggctctgaaagttaccttattttttgttgagttagtgacttcatttttcttgccacaatataagcttttgagggatttttttaaattggtgcttttaataagcaaataaatcccagggttttattttcttcagtgatacccctatagaaactcttaaatgtattggcgcatatatatatatatattttcttatgcatgctcgatgcattttcgtcctgagaaaaatgttctctacagaaactacccgtgtgtaaaaagaagattggcttaaaatggctactgtgatgggaacagtgtcttagggagatgcagcttggacttgaggtaaattgaatactttacaactgtggtttagagtttgctttaatgacattgtatgtaaaaggtcacatgattgctgtaattttgtattcattatggtttcctcaataaatgtacattgatgactattataaaggagtgctttgtgttttttatacatatattacatggtaaaattttctacttgactgggtttttttttatgtttactgtgagaaaaaatgattttaaaaagttttaatgataaaagggtaacatctggttgcacaagtcttaaaatacagaaagacttttaaatacagaagttactttatttgggttcacgttgtaaaataaaattgtcttccagaaaattaaaatataaaacaacttaatagaacgtaatagctaattatttacaaactcattttaaagactagaattttaaatcgaaggttgtgccactttttccctaagtctgatacacttagatcttgaagccttcgactatgttgaaagtgttttctcttgcgtgaactattaatagaaagttttttcattaaaatataatttgttcaggcaagatcacaacataaatttgctttataaatttaatatatattacatacgtttgaaaaataacatgtttaatatcctcaacactcaacactgtatagccattctttaagtcctttaatttttgtttttctccatgctcctccccttttcctctgaaaggagtgacagttttccccaccccgctccaatcccaatatatctgcttcagaaagactttgaaactacaacaaccaaaatggtgtactactaaagaaaaagtccactcaaattgataggttccaaattaattatctcagctatttcagcctaattttaggtgtaaaaagctcagaaatgacattccttcatgcaaaataatgtattctacttaggtttgtgtgttttttttttgtttttgttttttaaacatagttgctgtaaacgtctatgggaaatacagtctttataataggttctgatagaataattgagtaattcccccccataagtacattttattgactgttactgcataataggcgataaatctgatgcttatttggaaaagaagtaggcattctttagatgagctgtgctttgaagactgttatgaaaaggaataagaagtcagcatagtggcactcctggtttccttttttggccccgccacagaaaagatggatgtagtaagaaagttggagtgaaagagaaagttccagggagaggggaggggagctagtagtcatcagctaaaaaagagaagaagaaaagtgattttaaggaaaaaaaaattaatagaataaaagataaaaagagtgattaattcttactttcaatggtaagaatacaggtactagctgcagatcctttattgttgactgctttacacatatactctcctccatcttctgggaaagtttctggtaagtaaaggcagtaagtttctcccctttcaatatattgatagtcttctccatcctgcagtatttctccttcaaaccaccatgtaatttctggttgggttctcctgttactttaaccgtaaatctgactggctcactgtctacaactgatgtgtttttaagaggcttcttgaaccatggagctcctgatctggtttgctcttcatcttcagcagtggagccattcatgatgctaccttcttcctcctcctcctcttctcttttctgtattaaaataaatgcattcaggttggcatttatagtattttcagggcagcgatttagtaacaattttgaaatgaaatttttttttttaagtaaagaacatacaagtgtgcctactacaaagtgtacttaacagtacattccagtgacttgaaagaaaaccattaaaacatttttttaacctacctaattataaaactatgggttttaagagggcatctttggaaaataaaggatacataagcctggtaccttttgtagtgctgcatcaatttccctttgttcaaactgcatgcgtagtaacttttgttcttcaattcttctttgttcttcttcttctcttgccttagccatttgttcaaatctagctttcatattcactttgtgagtaaatggagcctcgctttttcttgcaggcctaacatcaacatcatcttcctgcaagaaagtgggccaagattaacaattgcttgccttctaaaaacaaagaagcgttactagttctaaaggtgtttagaagcacaaaatgattaacatgtttataatgcatatttttgctacactgcagacactcagattttttctaactctccagttcaggaaaagtgatagatacatttatgaagcattctcttagttatagactttttctccaaatgtaaagatcacaatatcactgggatcctagcctgtttgtcctaccaactctgcttggttttgatagcacttaactgaaaaaggtcagaatgctatacattctaaataattgttaaaagtactcccttgattcctgtaagtcc

SEQ ID NO: 2031 - DNA, 286 bp, Homo sapiens
tagaagaacaggggtgaattagagtaactgttaagatgacattctctaaactccacttcaacttctttacagttaatgccttcagactgttccattcatcatcccttcttcacttgatgtgtcatcttaaatttcttaatttaactactcaagtaataagatcatattttttgacatgagtctgagcctagaaccttagtttaagccattgggagacattagacttccatttttattaatagattatcttttatttgtaaacaaagtatctttcattgaaggaaaa

SEQ ID NO: 2032 - DNA, 1800 bp, Homo sapiens
tctcaaacatgcacgtgtacctttaggatgaatttctgcaattggatgtgccaggccagagcgtgtgcatttgtggctttggttgacatcacctagtcgcccttcctggggcctgtgctggtgtactctgaggcgcgattgtgtgaaaggtgggcgaaggtgcctgttcgaccacatcctcactggtagactgggtcaccacagttttggaaaggtgagaaatggtatctaaacatagtttgaatttgcatttcttttactggaagggaggctgcgcgtgtttcacatcagagccatgtgtgtttgtggttgttgaactttctctcttggattgctaggagtgctttatgtattagggaagcagacttccctaatgcgtgataacgcatgcagatactgtttccaagtttttgttatttgtcttttaaatttgtttttgcatttgtcttttcactttgatttttgccaggctggagttttgatgtttatgtggtcataggtgtgaatattttcttttgtggcttctggattttgagacacagtggctatagaaccactgtagccaaaagttatgtttgcttttggtttcatatactttgctttggtcctgtcttcttgactttatttaaaatagtaagatattcttactacatttttccattgcccatagctggaaggagattgtaattatcaccaaagatgaaaaactaaggcatgttctcagcagaggcagattagactttaagttagaggcttgtccttggtgcagaggcctgtgagcgacccggccccacttgccctgcacaccatggcgtggattgtgggcagtcacagggaagacctctggctttgctgggagctggggtacggttcttagagtgccattctagagtggcttcgcgtactggtaatgaacgcccatcaagtggccttgggaattcatgagccggatgatgatgacttcgccggtgaaaagcaaatcccaaataggttgttttctgtgcattccagtcccaatttctcttccaagtaattattagatgtgccaagcctgttacgtttattacttacagaattgtttttgtctgtgtgagtttactgaggacttaggggttggtatgtgaggaggggagccccccttctcctgtgggcactctagcactcttaataatcagtattaaacatgttgaaggccataaaggaaataaccttctcttaaaaacaagttagagtcagtcataaaactgtttgcctagaccttgatcacttaaaataagatcttagatgtgatgtgtctttgtggagtatttcctgtggctcgggaggtgtgcatgagagtggggtctgagggacagtgaggggtgaaggaaaggtgggagagagggccttcagtgactgtaccaaagactcacagacactgggtgtcttggtgatgggtgcacatagcccttcttttgtgactgaagctgtgtggccttcatcccacagggtctgccctctccagataattctgtcactgaacttcaaactgtcaatggaacgatagcgcagtctcttaacaatgcttcaggacagataatagagctgtgcgggcagcctcggtgacagtgttgggaatctgcagaatggctttgtccacttctttcctttcagaggagacattgaacctcggcatggtgtctcacgccaggaatcccagcatgttgggaggctgaggttgggggatcggattgcttgaggctaggagcttgaggtcagcctgcgcaacatagtgagaccctgtctctaccaaaaaaaaaa

SEQ ID NO: 2033 - DNA, 1776 bp, Homo sapiens
tctcaaacatgcacgtgtacctttaggatgaatttctgcaattggatgtgccaaggccagagcgtgtgcatttgtggctttggttgacatcaccaagtcgcccttcctggggcctgtgctggtgtactctgaggcgcgattgtgtgaaaggtgggcgaaggtgcctgttcgaccacatcctcactggtagactgggtcaccacagttttggaaaggtgagaaatggtatctaaacatagtttgaatttgcatttcttttactggaagggaggctgcgcgtgtttcacatcagagccatgtgtgtttgtggttgttgaactttctctcttggattgctaggagtgctttatgtattagggaagcagacttccctaatgcgtgataacgcatgcagatactgtttccaagtttttgttatttgtcttttaaatttgtttttgcatttgtcttttcactttgatttttgccaggctggagttttgatgtttatgtggtcataggtgtgaatattttcttttgtggcttctggattttgagacacagtggctatagaaccactgtagccaaaagttatgtttgcttttggtttcatatactttgctttggtcctgtcttcttgactttatttaaaatagtaagatattcttactacatttttccattgcccatagctggaaggagattgtaattatcaccaaagatgaaaaactaaggcatgttctcagcagaggcagattagactttaagttagaggcttgtccttggtgcagaggcctgtgagcgacccggccccacttgccctgcacaccatggcgtggattgtgggcagtcacagggaagacctctggctttgctgggagctggggtacggttcttagagtgccattctagagtggcttcgcgtactggtaatgaacgcccatcaagtggccttgggaattcatgagccggatgatgatgacttcgccggtgaaaagcaaatcccaaataggttgttttctgtgcattccagtcccaatttctcttccaagtaattattagatgtgccaagcctgttacgtttattacttacagaattgtttttgtctgtgtgagtttactgaggacttaggggttggtatgtgaggaggggagccccccttctcctgtgggcactctagcactcttaataatcagtattaaacatgttgaaggccataaaggaaataaccttctcttaaaaacaagttagagtcagtcataaaactgtttgcctagaccttgatcacttaaaataagatcttagatgtgatgtgtctttgtggagtatttcctgtggctcgggaggtgtgcatgagagtggggtctgagggacagtgaggggtgaaggaaaggtgggagagagggccttcagtgactgtaccaaagactcacagacactgggtgtcttggtgatgggtgcacatagcccttcttttgtgactgaagctgtgtggccttcatcccacagggtctgccctctccagataattctgtcactgaacttcaaactgtcaatggaacgatagcgcagtctcttaacaatgcttcaggacagataatagagctgtgcgggcagcctcggtgacagtgttgggaatctgcagaatggctttgtccacttctttcctttcagaggagacattgaacctcggcatggtgtctcacgccaggaatcccagcatgttgggaggctgaggttgggggatcggattgcttgaggctaggagcttgaggtcagcctgcgcaacatagtga

SEQ ID NO: 2034 - DNA, 110 bp, Homo sapiens
cgtactcaatgtgaagataacgagaatgaagaactttatgatggttcacttccacttactgaatactaaatatattttctctttcttatgattttctttttttaattaaa

SEQ ID NO: 2035 - DNA, 110 bp, Homo sapiens; identical to SEQ ID NO: 2034

SEQ ID NO: 2036 - DNA, 148 bp, Homo sapiens
  misc_feature (136)..(136): n equals a,t,g, or c
aaaaaaaaaaaaaaaaaaaaaaaaaaaaaaaaaaaaaaaaaaaaaaaaaaaaaaaaaaaaaaaaaaaaaaaaaaaaaaaaaaaaaaaaaaaaaaaaaaaaaaaaaaaaaaaaaaaaaaaaaaaaaaaaaaaaaaanaaaaaaaaaaaa

SEQ ID NO: 2037 - DNA, 152 bp, Homo sapiens
aaaaaaataaaaaaaaaaaaaaaaaaaaaaaaaataaaacaaaaaaaaaatataaaaaaaaaaaaaaaaaaaaaaaaaaaaaaaaaaaaaaaaaaaaaaacaaaaaaaaaaaaaaaaaatataaaaaaaaaaaaaaaaaaaaaattaaagag

SEQ ID NO: 2038 - DNA, 151 bp, Homo sapiens
aaaaaaaaaaaaaaaaaaaagaaaaaaaaaaaaaaaaaaaaaaaaaaaaaaaaaaaacaaaaaaaacaaaaaaaaaaaaaaaaaaaaaaataaataaaaaaaaaagagaaaaaaataaaaataaagaaataaataaaaaaaaaaaaaaaaa

SEQ ID NO: 2039 - DNA, 202 bp, Homo sapiens
aaaaaaaagaaaaaaaaaaaaaaaaataaaaaaaaaaaaaaaaaaaaaaaaaaaaaaaaaaaaaaaaaaaaaacaaaaaataaaaaaaaaaagaaaaaaaaaaaaataaaaaaaaaaataaaaaaaaacaaaaaaacaaaaaaaaaaaaaaaaaaaaaaaaaaaaaaaaaataaacaaaaaaaaaataaaacaaaaaaaaaa

SEQ ID NO: 2040 - DNA, 158 bp, Homo sapiens
taaaaaaaaaaaaaaaaaaaaaaaaaaaaaaaaaaaaaaaaaaaaaaaaaaaaaaaaaaaaaaaaaaaaaaaaaaaaaaaaaaaaaaaaacaaaaaaataaaaaaaaaaaaaataaaaaaaaaaaaaaaaaataaactaaaaaaaaaaaataaaaaaa

SEQ ID NO: 2041 - DNA, 126 bp, Homo sapiens
  misc_feature (9)..(10): n equals a,t,g, or c
  misc_feature (14)..(14): n equals a,t,g, or c
  misc_feature (20)..(20): n equals a,t,g, or c
  misc_feature (95)..(95): n equals a,t,g, or c
  misc_feature (107)..(108): n equals a,t,g, or c
  misc_feature (110)..(110): n equals a,t,g, or c
  misc_feature (118)..(118): n equals a,t,g, or c
gccaaaaannaaanaaaaanaaaaaaaaaaaaaaaaaaaaaaaaaaaaaaaaaaaaaaaaaaaaaaaaaaaaaaaaaaaaaaaaaaaaaaaaaanaaaaaaaaaaannanaaaaaaanaaaaaaaa

SEQ ID NO: 2042 - DNA, 77 bp, Homo sapiens
aaataaaaaaaaaaaaaaaaaaaaaaaaaaaaaaaaaaaaaaaaaaaaaaaaaaaaaaaaataaaaaaaaaaaaaaa

SEQ ID NO: 2043 - DNA, 964 bp, Homo sapiens
ctcacaagataatatctcttgcctttttcctctcggagtgttcctgcggtttgtgatctctcttagctctggtagcctgttcaggccttaaggtatctgttcggtattatgtggtcaagtagctgggaccacaggatcacaacaccacgtctggctaatttttttttttttttttttttttttttgtagagatggggtttcgctatgttggccaggctggtctcaaactcctggcctcaagcaatcttccagccttggcctcccaaagtgctgggattacaggtgtgagccaccacgtctggcttggagggcttattaaaacaccgattcttagcctcacccccagagtttctggttagtaggtcttggcagggctggagaatttgtatttccacaccttccttggtgatgtgttgttggtagttcagggagtacatgtgagaggaaccgtttagatagtaaaaactgcaaacctgaagaagaatagaagaatccttattctgtgctctcttagatttagtttcctcatctatgatcaataactattcatttcttcctcatttccaataacgatttgctgcttttaagagcaagagatcacttttccttcatgttgttttgctagtggcaaatcagaaatggtttcgccagtattcactgatcttgtaatcactctcggaatccagctgcatctctagtgtagagttttgggtcaacaagaataatgctgagcttaaagaattggactcagtctcttgaagtcaggggttgatgagaaggtggctctaatctattcattcaacaacttcctattgagcacctgctatgtgccaggtgctgttctagccactaagatagagcaggtaataacatagggccattgtccttatggaatttgtattttagtggggtgaataaaaaagggcagtctaggtggggcccagaaatagaaaaatagaaaaaa

SEQ ID NO: 2044 - DNA, 964 bp, Homo sapiens; identical to SEQ ID NO: 2043

SEQ ID NO: 2045 - DNA, 236 bp, Homo sapiens
tgggtggatcacgaggtcaggagttcaagaccagcctggccaacgtggtgaaccctcatctctaataaaaatgcaaaaattagccaagcatgatgatgcgtttctggaatcccagctactcagtgaggctgaggcaggagaatcgcttgaacctgggaaacagaggttgcagtgcactcagattgtgtcattgcactccagcctgggccacatagtgtgactctttcccccatccc

SEQ ID NO: 2046 - DNA, 236 bp, Homo sapiens; identical to SEQ ID NO: 2045

SEQ ID NO: 2047 - DNA, 3722 bp, Homo sapiens
cagatgcttcccactagagaagctaagaagctgtggcagccacagccgggacagggcctggcctccagcccagggctttccctgatgtccagcctcagctgcctcttcctgcctcatcccacccgcaagaggagctggggaccagagacagagacacaaactccatttgaatgtgaaccttggcaccatggagatgctcagggtgagcccagtctgctctctcattagtatgaatttccttgtgtttctgtctctctcctcttccctggtatcagctgctggccccaggttcctccagagaggagcgggggtgggtggggtggtgctgattaaatctgaggacatgacattgagcgagagaagcaaggggagctgctgacctccctggatggataaccatcaggaggcggtagcagagtccacataccatcaccttctcctgcagatgttggttcagccacctttcctctaccacagatgggctatgtgttttcaaagcagaagagcagagacggcagagaaccccagctggttcccaggcaaggataatgaatacagtcccctggaatgtgggggcctgccgcctggccctccccaccaccaactgccccccttcagcagactcctctgcttccccaagcaggtgggccaggctgttgtctgggaatgccacctgccaccaggcacatgagcagccaggccaggatgaggtgggcagcagaggctgctgcagcctggggcaggggtcagcacagcatctctccatccctgcctttgggcagcccatccgcccacgcgtggatccgccaaagcaaagccctgccttctctctcgcggggcgctcagagttgcacactctgggttggtctttgatgacaccggccttgtggaaggagcaaaaaaacaaacctttaatgtggacctgcaacaccttccattccacttccattatgtaatcttgggagtcactcaactctccaagcctcagtgccctcctctgtaaagtgaggccgtgaatagttccgactccacagcattgctgtgtggtgcaaataagaaaatacacttgacgcaccagcacgaggcctggcacctgcctggttcctatgatctctgtgtgccaagccctcagccaggcaaagtgtccccgggtttttctccagttctatggcattgaatcctaacaaaacccagcaagggaggtgtcacaggacttcctggtacgcgccaggagactgtggctcagaaaacaggtgttgactctgtctcgagcagtctgtaaatgtggagttggggctcacccccgcccccaactcccatcctctagcaaaaccaaggccttctgtcattgcaaatggcctgcaaacttgagagtgattggaaatgcatccccaccctccagaacccataagagacccagcgcctgagcccacacatgggagtagctcctgagtacaggcagggcaagggcgggaggcaggaaggcaggagccagatgatggattagcacaggaaggagcacagcacctggagttgctttttagtcttcttcccaagaactgcatggggctggcagggagaggaggggaagtaggaggccacacgacacctggcacccattgtatgttttttatttttttttatttttttgatggggataagatttgcatgacataaaattagccattttaagactgactcatgccttaatcctagcactttgggaggccgaggtgggtacattgcttgagtccaagagttcgagatcagcctgggcaacgtgtcaaaacctcatctctactaaaaatacaaaatattagccaagcatggtggcacgcgcctgtggtcccaggtactcgagaggctaaagtggaggatcacttgagcctgggagttcaaggctgcagtgagctatgattgcaccaccacactcccgcctgggcagcagagcgagacccggtctcaaaaaaaaaaaaaaaaaaaaaatcattttcaagtgagcaattcagtggcacttagtacattcacaatgatgtacaaccaccactgagttccagaatactttcatcaccccagaaggaagcctgtacccactcacagtcactccccattcccctctctcccaaccacctgccagtcaccaatctgagccccatctctatggatctacctactctggatatctcatataaatggcatcatacaatagttgacctcttatttagtttgatggcaagagggggaaggagctgctgctggagcccctccaggccctgcctgaagcttctgcttgtggggaagtttctagatgctcagagggagcagcccagtctgccctagacctttgtttacctccttctttggggctccgctgtgtagtggactgggtgccggtggtcctgggctttggtctcagctcagcagctgatgcagagtcctcagggaagctgctgcacctctctgggccccaggggtctcgtatgtgaagcgagcggttgaacttgtgggtccctgttgctgcttttgcacccccccactactcccaataagttctgaggagagacgggactccctgtggtagagacaaagggccactgctgattggaggggaggaggtccagaagctccttctaaaacggaaagaaagagaggggaagtggccttgaccttggtccagcaaggggcagtgggccaccagacctcgtgggttctctgccaaccatgagagccagtaaaagggataaagaaggtgaccagggcaggagcagagcccagtgtccaggggtgcacaacggcctgcttccctccagattgggtgcagccccagatgggtgacaccaggatggccgtgggccctaggagtgactggggaggaggccgcgtgtgtgtggtgtgtgctggccggcaggcatgtgcaggcttctgtgtataatctggcttgtaaattgctcggggactgtaactgcggaaagggccatagagccgcgtggtgttattatttatgataaagcacagaggtgcctgccagggactagaatgggctgagcactgcgtgcaggatggacggcaaattgaactccaattttctgctcggcagtctttgttacacgccacaaagcgctggtacaccggggtcaccagcctgatgaatgtgtgttcttcctcagcggtggctccatctctcagcctccgtgcagagagcgactcgtgctttgttttttcctccctgcggggcccagccttggaatctgttcctgggctccaaacgcagcctggacagaggggaggtcagaggccttgcatggaggcaggcggctatgggttcaaaacccagctctgccactgacacacatgtgactgggtacctctctcatctgagcttcagatgagagaaataaaagagaagtcctcatagcactcccctaaggaggctgggaggattaaatgggtaaacatgcgctgctcagtgtggagtaggcctttaacaaatacccatctttccttcttgtccctgggctgagcagcctcgccctgaagccaggaaattgaggagaagcccctgaaattgggcagacaggccccgtctgggggtggtgaggtcaagcccctaaggacacctgctgtccagctcagccctctttattcaatattgggaaaccaatgctggtgttaagtcagagccactgcccctagctcccatcttcccccagcttccatctctc

SEQ ID NO: 2048 - DNA, 278 bp, Homo sapiens
ctcgatttccaaatcaggtcacattctgaggttttgggaaggacatgaatttgggggagacatattcaacccaatacaggcatcacctagtcttgtcccacagatgactttattaaacatcccttggcttccatgttgggccttactgtcattcatttgccacatatttcccaagcatcttctttgtctcaggctctgtgcccagtgccagggctatagaaaaacaggagtcttgggcccagctctcctggcatctgtgtgatgtgttctgcttttct

SEQ ID NO: 2049 - DNA, 6504 bp, Homo sapiens
tcttagaaatggtttattgacaaatggcttctggggagggggccaggattccctcttagctacagaaggttccagggtccagctacaagcagggccctcgcacggggctcacacagagcaaggccactcagctggaatgtggcccctcaacaccactgcgcccaggctcccggacactggacacctttgcaggggtctgggtgtcccctgaggccggggccggcttccctcggggtgctcggtacttgttcttctggccgtagaacaggttcctctggaaaaggtggggaaggcggccctggtgcagcagcacagccaggaccatccctgcaagagaaggcaggtcccaggtgggccgcgggctcctgggcccaaacacagacaggacacccactcccaggcctgtgccaggacaggcgagccaggcagcctggccaggagccccaagaaccctgaggcccagctcctgcctggtcctggtcttcccgccctggtcatgcccctctctctgggtatgccagccatggggacgggggcaagccggtggggttccttgtacttctggaccaccctctgggatgagtgactggaattcccctccccccacattgtcctgagccactcccagagcttctgtggccattttcctccgggacctgatgtggcgtcccagggtggctgcttgcagggctgtggcctggcgtagaggtgggggatgtgagtggacaagaaagatgtggatgcccctgggtgggaggctgggcctggctaaatcctcatgcgaacgttctcccagaactccaggagcagagactcctaaatccccgcctgccttccaggtcattgggaagggcaggtgttccgggcagaaggggagagtagatcctcttcaagtttgatctcactcctctaaggatttaacccacagtgtgtgagctccactagggctggcctgagggggccctgcctgtcaccacctgcagctgctgtggctcctgacagtggcccctgtgcctacagcttgcctacagttgcccctcactcggccctccaggcccacactggtcctagctctgttcccaggagggcaggcccagggaggcgggatgacctgctcaggggtgctgccagcaggtgccggtggccgctcacacccagggagatagccccatgtccacacctggctacggggctcctggctgcagccttggagctccccagggctcatgctgatactgaacttgtggataaaggggttaatggaaggacacaagcctgtttttcggtttcctgaagctgccctaagatgacaggaaagggatgctgtcagaggtgtcaagcatccagatggatgagacgggaagagacgcaggagcacagcgtggggctgacaagcatgtggacgaccaaacactgctgacatggaggggccggatcgcccctccgcagggacgaaagctgggaaacaacccagttcttccgcagatgccccatgctttcagaagctggcgcccgggtccctgtgggatggggtggccctgggactcgcctaggaggagggacggcaattccgcatgggaagctccagggccccaaaccccaaaatacagaagcagccagtgcccccctccctggccctggcaggagacaggttcctctctagagggggcatgtggactcgagtatcaggcccgcccaagcctggagtcccgcctgaaacacggatcccagcctcctcctacttggctcctagaagccgcaaatgccctttgggcttctccacagaggcagttctacagtgagaggttgcagccgggtgaagagtatttccccagcgacacgcccttcccagaacacaggatgtgcccttgttagaatacggcctgggacataaaatcagtgaaatcacggtgacgtcatacttgagtagagtgaacctccaattcgatgactggtgtccctatatgaagagaacagacaatgacacagaggaggcggccaggggaaccggcagacatgggagtgctgcgtctccaagcccggggacaccgggggtgccagaggcccccggagcccggaagaggcaggaggctcctccccagcagcctccgaggagagctgaccctgtcagtgctgccagctcagactccagcctccagagctggctgagcatacaaccctgtcacgtgaagcctcttcgtttgcgtcctttgccttgtagcccgtgaagccaccacaggccatggttggggcctgagaaactcaggacgaaactgagctcccacccggaaccctgcccaggcctcaccgacactcaagtgcaggtcagaaccaggacactatttcagacacaggaggtctgaagtgtacctgccaggtccccgttctcaggaagctactgtgagacgggcaccagcaaaaagaaggaatcaaccgaaacaggaggcgatgaggaaagcaggaaacagaaatacaaccaggatcagtgaagggcagcaccataccggagatggacgcctgcgggtaacccggagctgcggatcctcgggggagacgctgcccacacagagcactggtgctgaactaaggaaagcacccagaagcctgggcaggagagagtccaggacctcgtcacccgcaggaagcaaggcctgtgcaggagcggagaggcctccggggccaccacagctcacccgggccgtgtttccatgccagggaactagagggggctctggagctgatcaggaggaagaggccgacccacccggagtgaaggatccgcaggaggagcgtggggaggcaaggaaagaacatccgccccccacatcccaggagacagcccagggttgatacctgaactgaagagtctcggagaagccctgcaggcccagtgtgtggggacagagaggccaacacggagctgttcctagcagagggcagtgctgcctcggcaacgggggcaggagggggttcctgatgcacttcatatgcttcctaggaccctgcacatgcctgagagactgtgaccacatcagaaccatggcgacaaatcacgatgacgtcagtgtcaccatcgcagggccaggtgcctgagagacccccagctcctgtctttccccccaaggggaggctgaggcattgcccctgagacctccccagtgtagagccagcagaagctgaaaaaagcttccagaattccataggaacccagctgcccttctggtacctcagtgaggtggagccgagtgtctgagagcaggtgcaggagaaggtgtgggctccacctgggcctctgaagccaggggccagaatccccagatctaggtccaagagggggctccatgacctccccatgctgctcctctgcttggatccaggatataagaaaggaggggcacacactgtgggggaactctggggtcccctgtgtgcatcagcgagtcccgggtctgccccaccaggatgcaaagggcctggctgctccagccccatgctcacagccctataagtgcacgatggcaccctatatcatctaagcggggctctctgcctcctgaggctttagggacaccagaatgagcccccctcggcggagtctggctctgggtgtgtggagatgccacctgggacgggaaccccaggtgcatggagccccactgcagacaccatcccccgtgtgcccagcaccccttgcaaggttggcctttccccagcctgtggcctccttacctggctgcagcttgctcggcaccgggacggtgtccacagtgagacatgccgtcacagcccctacccccgaaaccatgcccactgcagagacctccccaggagcactgaccaggcaccctcacctccaccctgcaggaccccacgtgccaggatgctctgtgggccccagcagccctagggaccccaccctgcccctgcccttacctgtcagagggcccagccagtacacctgcacgtactccagtaaggtgtgtcccgagcaggcaaaggtcacagaggcggccagggcagggttgaagaaggcagacgtgaagggcccggctgtgggcagagcacagacagccctggtccccagccctgcctgacgcccctctgcaggccaggacctgatccccgccaccgaatccacaccgagagccccactgtgtgcaggcctgggagctgctctcggctcctgaagccccgcctggtcccccgcaccgatggacacacgatgcagcaaggccgggtcagccaaggtctgggtcaggggcagcagcttggggccccccagggccgtccaacaccctcgcgacatctcaccgggatcccgtgccccgcccatgctgccctccagcaccccaccctgtgggatgtggccttcgagaaagacggacagagagagatggagagagacactaagagagacagatagtgagagagagacaaaaagacacagagagagacagggagacagagagagaggagagacagagagagagaggagagacagagagagagaggagagacagagagagagaggagagacagagagagagaggagagacagagagagagaggagagacagagagagacagggagacagagagagaggacagacagagagagagaggagagacagagagagagaggagagacagagagagagaggagagacagagagagagaggagagacagagagagatctcagaaataaacgagcagcagcagaggagagaagacgacatggctgtgcgatgtgagacaagggaaggcggcggcagccgggccgctgtcctgcagccccaggcctgggtgaccaccccaaataacagaatccaccaataccggggacctgcctctgggcacggaagagcagggagtgggcctagcggagggcagggaccacagggacatggagtctgcggccgcccaggtgtaaaccaggaccctgaggatgggcagctccgtccctgagaccaggcgccctgtgcctcgtggaggcaggacccttgacgggagctctccggtgccacccaggacagaggcccgggcaatctgccacagagccgtgtccctgcagagctcccgctcacccgtgcctcagtttccccatctgtacagggctctggtggcaccttcctgtggcctttgtggtccagattccgtggtgtctgcccagtgctgggtcgtgggcagtgccatggacctaagtgctggtcctgtcctgattaggacctcggacccccggaaggagacctggcaccattctccctgcagcccttcctgtggtgcctggagcacgagccggctcccctggctctccctgcagccccagcgctgtggacacctgtcctgggaacttgctgagcaaaggctttcgtggtggtggagcctagcgctcggaggggaaagcagacatgggggactggatcagacggagggtctgagtggagggagctcacaagggggtgatgggaccatgagagctgggtgccacggtcggtccaggtgcaggcagagatcgcaggatgcaggtgtcagtaggaggccagggaggccaactggggcaggtgagacaggacctgtcgctctggaaggggtgatagagggtgcagggactcccacaccagaccaggaaactgggctgggccttgaatcgtctgcctcggctgtccctactaccccagaggcagaacttctgggaggaccaagaatagctgcgactggggagaggtgcagtgggcaggatggccctggcaggggacaggctgctccaccgcaccccatgtccagcgcaggccctcgtctacccgccagatcccaggaaatcaccgcctcttcttgtgggtttgttggccacccgggccagcagccccctatcctgggtgcaaacgggcctgagtgtgcatggaggccacacaggtgagaggtcctcaggggcccaggggaaggggaagcagtgctcacccgtgtaggccgtgacggtgaccaacagagccacagcgggcccgctgtaggcgggaggactgtgccgcaggtgcaggagggtcagatggaaacaaaaggcgcaggcggcctccacaagcgccccgtggggcacggatgtgcgcagggccgagctgcagctctgggccatgaggctctgcagcaggtgcaggtcactgagctcccaggcccagcagaggcgcatcagggtgcaggcggcctgcatgcccagcccctgtgccgccagcttcaacagcgtgccaggcagagactgctcggccatgaggaactcctgcagggacacagtggggttggccgaggccccgtccaaggtgaccccgtgcgccaggaagagcaggaagagcagggtgagcagcaggtcaggcccaaagtccccagcccagggcccgagctcgaccagcgtcctcatctccaggcagcagggcccgagctgcacccgcacccaccgcctcccgggcgaagacttcataggcgcccactgggagcagggccttggaggcccgcc

SEQ ID NO: 2050 - DNA, 397 bp, Homo sapiens
tcgcaaaacaaggggcgattttatttcagctttgaactttccaggtctggggttcagaatttcctccagttagggaaggtgtctggtcgcctccaaggaggggaggccccaggctcttcgactcccacaggaaggccgcctgtccccctccccaacccatccactgacctcttcccaggaggcagagaaaccctggttccagtagggctgtggctgccttcggctgcctgttccctgtgcaagtgccctgccctctcagaggagcagaggaaccttctggaacctgtagaggcctggcatctgcacagggaaaagccaggctttccctcgtgggatcctgtggagaatgagctcagacggattcctcatattctaatccgacaccactggagacctt
